United States Patent Application Publication US 2024/0167057 A1 - sequence listing, part 3

SEQ ID NO: 16227 - protein, 13 aa, Severe acute respiratory syndrome-related coronavirus
  REGION 1..13: note = Table B: HLA-DRB1*01:03L HLA-DRB1*04:05L HLA-DRB4*03:01NL HLA-DRB1*08:04L HLA-DRB1*03:01L HLA-DRB1*11:02L HLA-DRB1*11:03L HLA-DRB1*11:04L HLA-DQA1*01:01-B1*05:01L HLA-DRB1*08:01L HLA-DRB1*11:01L HLA-DRB4*01:01L HLA-DRB1*04:10L HLA-DRB1*12:02L
  REGION 1..13: note = CONT. FROM ABOVE: HLA-DRB3*01:01L HLA-DRB1*14:54L HLA-DPA1*01:03 -B1*104:01L HLA-DRB1*14:17L HLA-DRB1*10:01L HLA-DRB1*04:08L HLA- DRB1*08:03L
  source 1..13: note = Severe acute respiratory syndrome coronavirus 2
RSMWSFNPETNIL

SEQ ID NO: 16228 - protein, 13 aa, Severe acute respiratory syndrome-related coronavirus
  REGION 1..13: note = Table B: HLA-DRB1*01:03L HLA-DRB3*02:01L HLA-DQA1*05:05-B1*03:01L HLA-DRB1*04:08L
  source 1..13: note = Severe acute respiratory syndrome coronavirus 2
TNILLNVPLHGTI

SEQ ID NO: 16229 - protein, 12 aa, Severe acute respiratory syndrome-related coronavirus
  REGION 1..12: note = Table B: HLA-DRB1*01:03L HLA-DQA1*01:02-B1*06:02L HLA-DRB1*01:02L HLA-DRB1*08:04L HLA-DRB1*14:01L HLA-DRB1*08:01L HLA-DPA1*01:03-B1*04:01L HLA-DPA1*01:03-B1*04:02L HLA-DRB1*12:01L HLA-DRB1*15:03L
  source 1..12: note = Severe acute respiratory syndrome coronavirus 2
GTILTRPLLESE

SEQ ID NO: 16230 - protein, 14 aa, Severe acute respiratory syndrome-related coronavirus
  REGION 1..14: note = Table B: HLA-DRB1*01:03L HLA-DRB1*04:02L HLA-DRB1*04:04L HLA-DRB1*04:05L HLA-DRB1*01:02L HLA-DRB1*12:01L HLA-DQA1*05:05-B1*03:01L HLA-DRB1*14:17L HLA-DRB1*16:01L HLA-DRB1*04:08L
  source 1..14: note = Severe acute respiratory syndrome coronavirus 2
RPLLESELVIGAVI

SEQ ID NO: 16231 - protein, 14 aa, Severe acute respiratory syndrome-related coronavirus
  REGION 1..14: note = Table B: HLA-DRB1*01:03L HLA-DRB1*04:05L HLA-DRB1*16:01L HLA-DRB1*15:03L
  source 1..14: note = Severe acute respiratory syndrome coronavirus 2
ESELVIGAVILRGH

SEQ ID NO: 16232 - protein, 14 aa, Severe acute respiratory syndrome-related coronavirus
  REGION 1..14: note = Table B: HLA-DRB1*01:03L HLA-DRB1*15:03L
  source 1..14: note = Severe acute respiratory syndrome coronavirus 2
SELVIGAVILRGHL

SEQ ID NO: 16233 - protein, 12 aa, Severe acute respiratory syndrome-related coronavirus
  REGION 1..12: note = Table B: HLA-DRB1*01:03L HLA-DRB1*01:02L HLA-DRB1*08:01L HLA-DRB1*16:01L HLA-DRB1*04:08L
  source 1..12: note = Severe acute respiratory syndrome coronavirus 2
VIGAVILRGHLR

SEQ ID NO: 16234 - protein, 12 aa, Severe acute respiratory syndrome-related coronavirus
  REGION 1..12: note = Table B: HLA-DRB1*01:03L HLA-DQA1*01:02-B1*06:02L HLA-DRB1*01:02L HLA-DRB1*14:01L HLA-DRB1*16:01L HLA-DRB1*15:03L
  source 1..12: note = Severe acute respiratory syndrome coronavirus 2
AVILRGHLRIAG

SEQ ID NO: 16235 - protein, 12 aa, Severe acute respiratory syndrome-related coronavirus
  REGION 1..12: note = Table B: HLA-DRB1*01:03L HLA-DQA1*01:02-B1*06:02L HLA-DRB1*01:02L HLA-DRB1*11:04L HLA-DRB1*08:01L HLA-DRB1*11:01L HLA-DRB1*04:08L
  source 1..12: note = Severe acute respiratory syndrome coronavirus 2
ILRGHLRIAGHH

SEQ ID NO: 16236 - protein, 16 aa, Severe acute respiratory syndrome-related coronavirus
  REGION 1..16: note = Table B: HLA-DRB1*01:03L
  source 1..16: note = Severe acute respiratory syndrome coronavirus 2
IAGHHLGRCDIKDLPK

SEQ ID NO: 16237 - protein, 15 aa, Severe acute respiratory syndrome-related coronavirus
  REGION 1..15: note = Table B: HLA-DRB1*01:03L HLA-DRB1*01:02L HLA-DRB1*08:04L HLA-DRB1*04:08L
  source 1..15: note = Severe acute respiratory syndrome coronavirus 2
GRCDIKDLPKEITVA

SEQ ID NO: 16238 - protein, 14 aa, Severe acute respiratory syndrome-related coronavirus
  REGION 1..14: note = Table B: HLA-DRB1*01:03L HLA-DRB1*12:01L HLA-DRB1*15:03L
  source 1..14: note = Severe acute respiratory syndrome coronavirus 2
TSRTLSYYKLGASQ

SEQ ID NO: 16239 - protein, 12 aa, Severe acute respiratory syndrome-related coronavirus
  REGION 1..12: note = Table B: HLA-DRB1*01:03L HLA-DRB1*04:08L
  source 1..12: note = Severe acute respiratory syndrome coronavirus 2
LSYYKLGASQRV

SEQ ID NO: 16240 - protein, 10 aa, Severe acute respiratory syndrome-related coronavirus
  REGION 1..10: note = Table B: HLA-DRB1*01:03L HLA-DRB1*01:02L HLA-DRB1*16:01L HLA-DQA1*02:01-B1*03:03L
  source 1..10: note = Severe acute respiratory syndrome coronavirus 2
YKLGASQRVA

SEQ ID NO: 16241 - protein, 12 aa, Severe acute respiratory syndrome-related coronavirus
  REGION 1..12: note = Table B: HLA-DRB1*01:03L HLA-DQA1*01:02-B1*06:02L HLA-DRB1*08:01L HLA-DRB1*11:01L HLA-DRB1*16:01L HLA-DRB1*04:08L
  source 1..12: note = Severe acute respiratory syndrome coronavirus 2
GFAAYSRYRIGN

SEQ ID NO: 16242 - protein, 10 aa, Severe acute respiratory syndrome-related coronavirus
  REGION 1..10: note = Table B: HLA-DRB1*01:03L HLA-DQA1*03:01-B1*03:02L HLA-DPA1*01:02-B1*04:01L
  source 1..10: note = Severe acute respiratory syndrome coronavirus 2
YSRYRIGNYK

SEQ ID NO: 16243 - protein, 12 aa, Severe acute respiratory syndrome-related coronavirus
  REGION 1..12: note = Table B: HLA-DRB1*01:03L HLA-DQA1*01:02-B1*06:02L HLA-DRB1*01:02L HLA-DRB1*08:01L HLA-DPA1*01:02-B1*04:01L HLA-DRB1*16:01L HLA-DRB1*04:08L HLA-DQA1*02:01-B1*03:03L
  source 1..12: note = Severe acute respiratory syndrome coronavirus 2
YRIGNYKLNTDH

SEQ ID NO: 16244 - protein, 12 aa, Severe acute respiratory syndrome-related coronavirus
  REGION 1..12: note = Table B: HLA-DRB1*01:03L HLA-DRB1*16:01L
  source 1..12: note = Severe acute respiratory syndrome coronavirus 2
KLNTDHSSSSDN

SEQ ID NO: 16245 - protein, 11 aa, Severe acute respiratory syndrome-related coronavirus
  REGION 1..11: note = Table B: HLA-DRB1*01:03L HLA-DPA1*03:01-B1*04:02L HLA-DPA1*01:03-B1*04:01L HLA-DPA1*01:03-B1*04:02L HLA-DPA1*03:01-B1*105:01L HLA-DPA1*01:02-B1*04:01L HLA-DRB1*16:01L HLA-DRB1*04:08L
  source 1..11: note = Severe acute respiratory syndrome coronavirus 2
RTFKVSIWNLD

SEQ ID NO: 16246 - protein, 11 aa, Severe acute respiratory syndrome-related coronavirus
  REGION 1..11: note = Table B: HLA-DRB1*01:03L HLA-DQA1*01:02-B1*06:02L HLA-DRB1*08:04L HLA-DRB1*14:01L HLA-DRB1*11:04L HLA-DRB1*14:54L HLA-DRB1*04:08L
  source 1..11: note = Severe acute respiratory syndrome coronavirus 2
INLIIKNLSKS

SEQ ID NO: 16247 - protein, 13 aa, Severe acute respiratory syndrome-related coronavirus
  REGION 1..13: note = Table B: HLA-DRB1*01:03L HLA-DRB4*03:01NL HLA-DRB1*08:01L HLA-DRB1*12:01L HLA-DPA1*03:01-B1*105:01L HLA-DRB1*14:17L HLA-DRB1*04:08L HLA-DRB1*15:03L
  source 1..13: note = Severe acute respiratory syndrome coronavirus 2
TENKYSQLDEEQP

SEQ ID NO: 16248 - protein, 13 aa, Severe acute respiratory syndrome-related coronavirus
  REGION 1..13: note = Table B: HLA-DRB1*01:03L HLA-DRB1*01:02L HLA-DRB4*03:01NL HLA-DRB1*08:04L HLA-DRB1*08:01L HLA-DRB1*12:01L HLA-DPA1*03:01-B1*105:01L HLA-DRB1*14:54L HLA-DRB1*14:17L HLA-DRB1*04:08L HLA-DRB1*15:03L
  source 1..13: note = Severe acute respiratory syndrome coronavirus 2
ENKYSQLDEEQPM

SEQ ID NO: 16249 - protein, 12 aa, Severe acute respiratory syndrome-related coronavirus
  REGION 1..12: note = Table B: HLA-DRB1*01:03L HLA-DRB1*01:02L HLA-DRB1*08:01L HLA-DRB1*11:01L HLA-DPA1*03:01-B1*105:01L HLA-DRB1*16:01L HLA-DRB1*04:08L HLA-DRB1*15:03L
  source 1..12: note = Severe acute respiratory syndrome coronavirus 2
LYHYQECVRGTT

SEQ ID NO: 16250 - protein, 11 aa, Severe acute respiratory syndrome-related coronavirus
  REGION 1..11: note = Table B: HLA-DRB1*01:03L HLA-DQA1*03:01-B1*03:02L
  source 1..11: note = Severe acute respiratory syndrome coronavirus 2
GVKHVYQLRAR

SEQ ID NO: 16251 - protein, 13 aa, Severe acute respiratory syndrome-related coronavirus
  REGION 1..13: note = Table B: HLA-DRB1*01:03L HLA-DRB1*01:02L HLA-DRB1*12:01L HLA-DRB1*16:01L HLA-DRB1*04:08L HLA-DRB1*15:03L
  source 1..13: note = Severe acute respiratory syndrome coronavirus 2
VKHVYQLRARSVS

SEQ ID NO: 16252 - protein, 12 aa, Severe acute respiratory syndrome-related coronavirus
  REGION 1..12: note = Table B: HLA-DRB1*01:03L HLA-DRB1*01:02L HLA-DRB1*16:01L HLA-DRB1*04:08L
  source 1..12: note = Severe acute respiratory syndrome coronavirus 2
HVYQLRARSVSP

SEQ ID NO: 16253 - protein, 10 aa, Severe acute respiratory syndrome-related coronavirus
  REGION 1..10: note = Table B: HLA-DRB1*01:03L HLA-DQA1*01:02-B1*06:02L HLA-DQA1*01:03-B1*06:01L HLA-DQA1*02:01-B1*03:03L
  source 1..10: note = Severe acute respiratory syndrome coronavirus 2
RARSVSPKLF

SEQ ID NO: 16254 - protein, 14 aa, Severe acute respiratory syndrome-related coronavirus
  REGION 1..14: note = Table B: HLA-DRB1*01:03L HLA-DRB1*04:05L HLA-DRB1*01:02L HLA-DRB1*08:01L HLA-DRB1*16:01L HLA-DRB1*04:08L
  source 1..14: note = Severe acute respiratory syndrome coronavirus 2
ARSVSPKLFIRQEE

SEQ ID NO: 16255 - protein, 12 aa, Severe acute respiratory syndrome-related coronavirus
  REGION 1..12: note = Table B: HLA-DRB1*01:03L HLA-DRB1*04:05L HLA-DQA1*01:02-B1*06:02L HLA-DRB1*08:01L HLA-DPA1*02:01-B1*13:01L HLA-DRB1*04:08L
  source 1..12: note = Severe acute respiratory syndrome coronavirus 2
PKLFIRQEEVQE

SEQ ID NO: 16256 - protein, 13 aa, Severe acute respiratory syndrome-related coronavirus
  REGION 1..13: note = Table B: HLA-DRB1*01:03L HLA-DRB1*01:02L HLA-DPA1*01:03-B1*03:01L HLA-DPA1*01:03-B1*04:01L HLA-DPA1*01:03-B1*04:02L HLA-DRB1*12:01L HLA-DPA1*01:02-B1*04:01L HLA-DRB1*16:01L
  REGION 1..13: note = CONT. FROM ABOVE: HLA-DQA1*01:03-B1*06:01L HLA-DRB1*04:08L
  source 1..13: note = Severe acute respiratory syndrome coronavirus 2
VQELYSPIFLIVA

SEQ ID NO: 16257 - protein, 13 aa, Severe acute respiratory syndrome-related coronavirus
  REGION 1..13: note = Table B: HLA-DRB1*01:03L HLA-DQA1*01:02-B1*06:02L HLA-DRB1*12:01L HLA-DRB1*04:08L HLA-DRB1*15:03L
  source 1..13: note = Severe acute respiratory syndrome coronavirus 2
IVFITLCFTLKRK

SEQ ID NO: 16258 - protein, 14 aa, Severe acute respiratory syndrome-related coronavirus
  REGION 1..14: note = Table B: HLA-DRB1*01:03L HLA-DRB1*08:04L
  source 1..14: note = Severe acute respiratory syndrome coronavirus 2
LVFLGIITTVAAFH

SEQ ID NO: 16259 - protein, 12 aa, Severe acute respiratory syndrome-related coronavirus
  REGION 1..12: note = Table B: HLA-DRB1*01:03L HLA-DRB1*08:04L HLA-DPA1*01:03-B1*03:01L HLA-DRB1*11:04L HLA-DRB1*12:02L HLA-DPA1*03:01-B1*105:01L HLA-DQA1*05:05-B1*03:01L HLA-DRB1*10:01L HLA-DRB1*08:03L HLA-DRB1*15:03L
  source 1..12: note = Severe acute respiratory syndrome coronavirus 2
LGIITTVAAFHQ

SEQ ID NO: 16260 - protein, 14 aa, Severe acute respiratory syndrome-related coronavirus
  REGION 1..14: note = Table B: HLA-DRB1*01:03L HLA-DQA1*01:02-B1*06:02L HLA-DRB1*01:02L HLA-DPA1*03:01-B1*105:01L HLA-DRB1*04:08L HLA-DRB1*15:03L
  source 1..14: note = Severe acute respiratory syndrome coronavirus 2
VAAFHQECSLQSCT

SEQ ID NO: 16261 - protein, 12 aa, Severe acute respiratory syndrome-related coronavirus
  REGION 1..12: note = Table B: HLA-DRB1*01:03L HLA-DRB1*15:03L
  source 1..12: note = Severe acute respiratory syndrome coronavirus 2
IHFYSKWYIRVG

SEQ ID NO: 16262 - protein, 12 aa, Severe acute respiratory syndrome-related coronavirus
  REGION 1..12: note = Table B: HLA-DRB1*01:03L HLA-DRB1*08:01L
  source 1..12: note = Severe acute respiratory syndrome coronavirus 2
FYSKWYIRVGAR

SEQ ID NO: 16263 - protein, 12 aa, Severe acute respiratory syndrome-related coronavirus
  REGION 1..12: note = Table B: HLA-DRB1*01:03L HLA-DRB1*04:05L HLA-DRB1*01:02L HLA-DRB1*08:01L HLA-DRB1*12:01L HLA-DRB1*16:01L HLA-DRB1*04:08L HLA-DRB1*15:03L
  source 1..12: note = Severe acute respiratory syndrome coronavirus 2
SKWYIRVGARKS

SEQ ID NO: 16264 - protein, 12 aa, Severe acute respiratory syndrome-related coronavirus
  REGION 1..12: note = Table B: HLA-DRB1*01:03L HLA-DRB1*01:02L HLA-DRB1*12:01L HLA-DRB1*16:01L HLA-DRB1*04:08L HLA-DRB1*15:03L
  source 1..12: note = Severe acute respiratory syndrome coronavirus 2
WYIRVGARKSAP

SEQ ID NO: 16265 - protein, 13 aa, Severe acute respiratory syndrome-related coronavirus
  REGION 1..13: note = Table B: HLA-DRB1*01:03L HLA-DQA1*01:02-B1*06:02L HLA-DRB1*01:02L HLA-DRB1*16:01L HLA-DQA1*02:01-B1*03:03L
  source 1..13: note = Severe acute respiratory syndrome coronavirus 2
IRVGARKSAPLIE

SEQ ID NO: 16266 - protein, 10 aa, Severe acute respiratory syndrome-related coronavirus
  REGION 1..10: note = Table B: HLA-DRB1*01:03L HLA-DQA1*01:02-B1*06:02L HLA-DPA1*01:03-B1*03:01L HLA-DPA1*03:01-B1*04:02L HLA-DQA1*01-B1*05L HLA-DQA1*05:01-B1*02:01L HLA-DPA1*01:03-B1*04:01L HLA-DPA1*01:03-B1*04:02L
  REGION 1..10: note = CONT. FROM ABOVE: HLA-DPA1*03:01-B1*105:01L HLA-DPA1*01:02-B1*04 :01M HLA-DRB1*16:01L HLA-DQA1*01:03-B1*06:01L HLA-DRB1*04:08L HL A-DRB1*15:03L
  source 1..10: note = Severe acute respiratory syndrome coronavirus 2
FYEDFLEYHD

SEQ ID NO: 16267 - protein, 10 aa, Severe acute respiratory syndrome-related coronavirus
  REGION 1..10: note = Table B: HLA-DRB1*01:03L HLA-DQA1*01:02-B1*06:02L HLA-DQA1*02:01-B1*03:03L
  source 1..10: note = Severe acute respiratory syndrome coronavirus 2
NQRNAPRITF

SEQ ID NO: 16268 - protein, 15 aa, Severe acute respiratory syndrome-related coronavirus
  REGION 1..15: note = Table B: HLA-DRB1*01:03L
  source 1..15: note = Severe acute respiratory syndrome coronavirus 2
NGERSGARSKQRRPQ

SEQ ID NO: 16269 - protein, 15 aa, Severe acute respiratory syndrome-related coronavirus
  REGION 1..15: note = Table B: HLA-DRB1*01:03L HLA-DRB1*08:01L
  source 1..15: note = Severe acute respiratory syndrome coronavirus 2
GERSGARSKQRRPQG

SEQ ID NO: 16270 - protein, 16 aa, Severe acute respiratory syndrome-related coronavirus
  REGION 1..16: note = Table B: HLA-DRB1*01:03L HLA-DRB1*01:02L HLA-DPA1*01:03-B1*03:01L HLA-DPA1*03:01-B1*04:02L HLA-DQA1*05:01-B1*02:01L HLA-DPA1*01:03-B1*04:02L HLA-DRB1*12:01L HLA-DRB1*15:03L
  source 1..16: note = Severe acute respiratory syndrome coronavirus 2
LPNNTASWFTALTQHG

SEQ ID NO: 16271 - protein, 15 aa, Severe acute respiratory syndrome-related coronavirus
  REGION 1..15: note = Table B: HLA-DRB1*01:03L HLA-DRB1*01:02L HLA-DRB1*16:01L HLA-DQA1*02:01-B1*03:03L HLA-DRB1*15:03L
  source 1..15: note = Severe acute respiratory syndrome coronavirus 2
GKEDLKFPRGQGVPI

SEQ ID NO: 16272 - protein, 14 aa, Severe acute respiratory syndrome-related coronavirus
  REGION 1..14: note = Table B: HLA-DRB1*01:03L HLA-DQA1*01:02-B1*06:02L HLA-DRB1*01:02L HLA-DRB1*14:01L HLA-DRB1*08:01L HLA-DRB1*16:01L HLA-DRB1*04:08L HLA-DQA1*02:01-B1*03:03L
  source 1..14: note = Severe acute respiratory syndrome coronavirus 2
SPDDQIGYYRRATR

SEQ ID NO: 16273 - protein, 10 aa, Severe acute respiratory syndrome-related coronavirus
  REGION 1..10: note = Table B: HLA-DRB1*01:03L
  source 1..10: note = Severe acute respiratory syndrome coronavirus 2
IGYYRRATRR

SEQ ID NO: 16274 - protein, 12 aa, Severe acute respiratory syndrome-related coronavirus
  REGION 1..12: note = Table B: HLA-DRB1*01:03L HLA-DRB1*01:02L HLA-DRB1*08:01L HLA-DRB1*16:01L HLA-DRB1*04:08L
  source 1..12: note = Severe acute respiratory syndrome coronavirus 2
GYYRRATRRIRG

SEQ ID NO: 16275 - protein, 14 aa, Severe acute respiratory syndrome-related coronavirus
  REGION 1..14: note = Table B: HLA-DRB1*01:03L HLA-DRB1*01:02L HLA-DRB1*08:01L HLA-DRB1*11:01L HLA-DRB1*12:01L HLA-DRB3*01:01L HLA-DRB1*16:01L HLA-DRB1*04:08L
  source 1..14: note = Severe acute respiratory syndrome coronavirus 2
YYRRATRRIRGGDG

SEQ ID NO: 16276 - protein, 10 aa, Severe acute respiratory syndrome-related coronavirus
  REGION 1..10: note = Table B: HLA-DRB1*01:03L HLA-DQA1*03:01-B1*03:02L HLA-DQA1*02:01-B1*03:03L
  source 1..10: note = Severe acute respiratory syndrome coronavirus 2
DGKMKDLSPR

SEQ ID NO: 16277 - protein, 14 aa, Severe acute respiratory syndrome-related coronavirus
  REGION 1..14: note = Table B: HLA-DRB1*01:03L HLA-DRB1*01:02L
  source 1..14: note = Severe acute respiratory syndrome coronavirus 2
RWYFYYLGTGPEAG

SEQ ID NO: 16278 - protein, 14 aa, Severe acute respiratory syndrome-related coronavirus
  REGION 1..14: note = Table B: HLA-DRB1*01:03L HLA-DRB1*01:02L HLA-DPA1*01:03-B1*03:01L HLA-DPA1*01:03-B1*04:02L HLA-DRB1*15:03L
  source 1..14: note = Severe acute respiratory syndrome coronavirus 2
FYYLGTGPEAGLPY

SEQ ID NO: 16279 - protein, 12 aa, Severe acute respiratory syndrome-related coronavirus
  REGION 1..12: note = Table B: HLA-DRB1*01:03L HLA-DPA1*01:03-B1*04:02L HLA-DPA1*03:01-B1*105:01L
  source 1..12: note = Severe acute respiratory syndrome coronavirus 2
TGPEAGLPYGAN

SEQ ID NO: 16280 - protein, 17 aa, Severe acute respiratory syndrome-related coronavirus
  REGION 1..17: note = Table B: HLA-DRB1*01:03L
  source 1..17: note = Severe acute respiratory syndrome coronavirus 2
EGALNTPKDHIGTRNPA

SEQ ID NO: 16281 - protein, 15 aa, Severe acute respiratory syndrome-related coronavirus
  REGION 1..15: note = Table B: HLA-DRB1*01:03L HLA-DQA1*05:05-B1*03:01L
  source 1..15: note = Severe acute respiratory syndrome coronavirus 2
GTTLPKGFYAEGSRG

SEQ ID NO: 16282 - protein, 11 aa, Severe acute respiratory syndrome-related coronavirus
  REGION 1..11: note = Table B: HLA-DRB1*01:03L HLA-DRB1*04:02L HLA-DRB1*08:04L HLA-DRB1*12:01L HLA-DRB1*14:17L HLA-DRB1*16:01L HLA-DRB1*04:08L
  source 1..11: note = Severe acute respiratory syndrome coronavirus 2
LLLLDRLNQLE

SEQ ID NO: 16283 - protein, 12 aa, Severe acute respiratory syndrome-related coronavirus
  REGION 1..12: note = Table B: HLA-DRB1*01:03L HLA-DQA1*01:02-B1*06:02L HLA-DRB1*01:02L HLA-DRB1*16:01L HLA-DRB1*04:08L
  source 1..12: note = Severe acute respiratory syndrome coronavirus 2
LLLDRLNQLESK

SEQ ID NO: 16284 - protein, 13 aa, Severe acute respiratory syndrome-related coronavirus
  REGION 1..13: note = Table B: HLA-DRB1*01:03L HLA-DRB1*04:02L HLA-DRB1*04:04L HLA-DRB1*04:05L HLA-DRB1*14:01L HLA-DRB1*04:10L HLA-DRB1*12:01L HLA-DQA1*03:01-B1*03:02L HLA-DRB1*16:01L HLA-DRB1*04:08L HLA-DQA1*02:01-B1*03:03L HLA-DRB1*15:03L
  source 1..13: note = Severe acute respiratory syndrome coronavirus 2
LDRLNQLESKMSG

SEQ ID NO: 16285 - protein, 14 aa, Severe acute respiratory syndrome-related coronavirus
  REGION 1..14: note = Table B: HLA-DRB1*01:03L HLA-DRB1*04:05L HLA-DRB1*12:01L HLA-DRB1*16:01L HLA-DRB1*04:08L HLA-DRB1*15:03L
  source 1..14: note = Severe acute respiratory syndrome coronavirus 2
DRLNQLESKMSGKG

SEQ ID NO: 16286 - protein, 14 aa, Severe acute respiratory syndrome-related coronavirus
  REGION 1..14: note = Table B: HLA-DRB1*01:03L HLA-DRB1*04:02L HLA-DQA1*01:02-B1*06:02L HLA-DRB1*08:04L HLA-DRB1*14:01L HLA-DRB1*11:04L HLA-DRB1*11:01L HLA-DRB1*04:08L
  source 1..14: note = Severe acute respiratory syndrome coronavirus 2
NQLESKMSGKGQQQ

SEQ ID NO: 16287 - protein, 12 aa, Severe acute respiratory syndrome-related coronavirus
  REGION 1..12: note = Table B: HLA-DRB1*01:03L HLA-DRB1*04:02L HLA-DRB1*08:01L HLA-DRB1*14:17L HLA-DRB1*04:08L HLA-DQA1*02:01-B1*03:03L
  source 1..12: note = Severe acute respiratory syndrome coronavirus 2
TVTKKSAAEASK

SEQ ID NO: 16288 - protein, 10 aa, Severe acute respiratory syndrome-related coronavirus
  REGION 1..10: note = Table B: HLA-DRB1*01:03L HLA-DQA1*02:01-B1*03:03L
  source 1..10: note = Severe acute respiratory syndrome coronavirus 2
RQKRTATKAY

SEQ ID NO: 16289 - protein, 13 aa, Severe acute respiratory syndrome-related coronavirus
  REGION 1..13: note = Table B: HLA-DRB1*01:03L HLA-DRB1*04:05L
  source 1..13: note = Severe acute respiratory syndrome coronavirus 2
ATKAYNVTQAFGR

SEQ ID NO: 16290 - protein, 11 aa, Severe acute respiratory syndrome-related coronavirus
  REGION 1..11: note = Table B: HLA-DRB1*01:03L HLA-DRB1*01:02L HLA-DRB1*16:01L HLA-DQA1*02:01-B1*03:03L HLA-DRB1*15:03L
  source 1..11: note = Severe acute respiratory syndrome coronavirus 2
AYNVTQAFGRR

SEQ ID NO: 16291 - protein, 12 aa, Severe acute respiratory syndrome-related coronavirus
  REGION 1..12: note = Table B: HLA-DRB1*01:03L HLA-DQA1*01:02-B1*06:02L HLA-DRB1*01:02L HLA-DRB1*12:01L HLA-DRB1*16:01L HLA-DQA1*01:03-B1*06:01L HLA-DRB1*04:08L HLA-DQA1*02:01-B1*03:03L HLA-DRB1*15:03L
  source 1..12: note = Severe acute respiratory syndrome coronavirus 2
YNVTQAFGRRGP

SEQ ID NO: 16292 - protein, 13 aa, Severe acute respiratory syndrome-related coronavirus
  REGION 1..13: note = Table B: HLA-DRB1*01:03L HLA-DRB1*04:05L HLA-DQA1*01:01-B1*05:01L
  source 1..13: note = Severe acute respiratory syndrome coronavirus 2
GDQELIRQGTDYK

SEQ ID NO: 16293 - protein, 13 aa, Severe acute respiratory syndrome-related coronavirus
  REGION 1..13: note = Table B: HLA-DRB1*01:03L HLA-DRB1*04:04L HLA-DRB1*04:05L HLA-DRB1*01:02L HLA-DRB1*14:01L HLA-DRB1*04:10L HLA-DRB1*14:54L HLA-DRB1*14:17L HLA-DRB1*04:08L
  source 1..13: note = Severe acute respiratory syndrome coronavirus 2
DQELIRQGTDYKH

SEQ ID NO: 16294 - protein, 10 aa, Severe acute respiratory syndrome-related coronavirus
  REGION 1..10: note = Table B: HLA-DRB1*01:03L HLA-DRB1*04:05L HLA-DQA1*01:02-B1*06:02L HLA-DPA1*02:01-B1*13:01L HLA-DRB1*16:01L HLA-DQA1*01:03-B1*06:01L HLA-DQA1*02:01-B1*03:03L
  source 1..10: note = Severe acute respiratory syndrome coronavirus 2
YKHWPQIAQF

SEQ ID NO: 16295 - protein, 11 aa, Severe acute respiratory syndrome-related coronavirus
  REGION 1..11: note = Table B: HLA-DRB1*01:03L HLA-DRB4*03:01NL HLA-DPA1*03:01-B1*04:02L HLA-DRB1*14:01L HLA-DRB5*01:01L HLA-DQA1*05:05-B1*03:116L HLA-DPA1*01:03-B1*04:02L HLA-DRB1*12:01L HLA-DPA1*02:01-B1*13:01L HLA-DRB1*08:02L
  source 1..11: note = Severe acute respiratory syndrome coronavirus 2
EVTPSGTWLTY

SEQ ID NO: 16296 - protein, 13 aa, Severe acute respiratory syndrome-related coronavirus
  REGION 1..13: note = Table B: HLA-DRB1*01:03L HLA-DQA1*01:02-B1*06:02L HLA-DRB1*01:02L HLA-DRB1*08:01L HLA-DRB1*12:01L HLA-DPA1*03:01-B1*105:01L HLA-DRB1*16:01L HLA-DRB1*04:08L
  source 1..13: note = Severe acute respiratory syndrome coronavirus 2
PNFKDQVILLNKH

SEQ ID NO: 16297 - protein, 13 aa, Severe acute respiratory syndrome-related coronavirus
  REGION 1..13: note = Table B: HLA-DRB1*01:03L HLA-DRB1*04:04L HLA-DRB1*04:05L HLA-DRB1*01:02L HLA-DRB1*14:01L HLA-DRB1*08:01L HLA-DRB1*12:01L HLA-DQA1*03:01-B1*03:02L HLA-DRB1*14:17L HLA-DRB1*04:08L HLA-DQA1*02:01-B1*03:03L HLA-DRB1*15:01L
  source 1..13: note = Severe acute respiratory syndrome coronavirus 2
NKHIDAYKTFPPT

SEQ ID NO: 16298 - protein, 14 aa, Severe acute respiratory syndrome-related coronavirus
  REGION 1..14: note = Table B: HLA-DRB1*01:03L HLA-DRB1*01:02L HLA-DRB1*12:01L HLA-DRB1*04:08L
  source 1..14: note = Severe acute respiratory syndrome coronavirus 2
KHIDAYKTFPPTEP

SEQ ID NO: 16299 - protein, 14 aa, Severe acute respiratory syndrome-related coronavirus
  REGION 1..14: note = Table B: HLA-DRB1*01:03L HLA-DRB1*01:02L
  source 1..14: note = Severe acute respiratory syndrome coronavirus 2
TFPPTEPKKDKKKK

SEQ ID NO: 16300 - protein, 15 aa, Severe acute respiratory syndrome-related coronavirus
  REGION 1..15: note = Table B: HLA-DRB1*01:03L HLA-DRB1*08:01L HLA-DRB1*16:01L
  source 1..15: note = Severe acute respiratory syndrome coronavirus 2
DKKKKADETQALPQR

SEQ ID NO: 16301 - protein, 14 aa, Severe acute respiratory syndrome-related coronavirus
  REGION 1..14: note = Table B: HLA-DRB1*01:03L
  source 1..14: note = Severe acute respiratory syndrome coronavirus 2
LDDFSKQLQQSMSS

SEQ ID NO: 16302 - protein, 14 aa, Severe acute respiratory syndrome-related coronavirus
  REGION 1..14: note = Table B: HLA-DRB1*01:03L HLA-DRB1*01:02L HLA-DPA1*01:03-B1*04:02L HLA-DRB1*04:08L
  source 1..14: note = Severe acute respiratory syndrome coronavirus 2
TIYSLLLCRMNSRN

SEQ ID NO: 16303 - protein, 11 aa, Severe acute respiratory syndrome-related coronavirus
  REGION 1..11: note = Table B: HLA-DRB1*04:02L HLA-DRB3*02:01L HLA-DRB1*11:04L HLA-DRB1*08:01L HLA-DPA1*01:03-B1*04:02L HLA-DRB1*14:17L HLA-DQA1*01:03-B1*06:01L
  source 1..11: note = Severe acute respiratory syndrome coronavirus 2
DSVEEVLSEAR

SEQ ID NO: 16304 - protein, 12 aa, Severe acute respiratory syndrome-related coronavirus
  REGION 1..12: note = Table B: HLA-DRB1*04:02L HLA-DRB1*04:05L HLA-DRB1*11:04L HLA-DRB3*01:01L HLA-DRB1*14:54L HLA-DRB1*04:08L
  source 1..12: note = Severe acute respiratory syndrome coronavirus 2
EEVLSEARQHLK

SEQ ID NO: 16305 - protein, 12 aa, Severe acute respiratory syndrome-related coronavirus
  REGION 1..12: note = Table B: HLA-DRB1*04:02L HLA-DRB1*14:01L HLA-DRB1*14:17L
  source 1..12: note = Severe acute respiratory syndrome coronavirus 2
GVLVPHVGEIPV

SEQ ID NO: 16306 - protein, 12 aa, Severe acute respiratory syndrome-related coronavirus
  REGION 1..12: note = Table B: HLA-DRB1*04:02L HLA-DRB1*14:17L
  source 1..12: note = Severe acute respiratory syndrome coronavirus 2
VLVPHVGEIPVA

SEQ ID NO: 16307 - protein, 12 aa, Severe acute respiratory syndrome-related coronavirus
  REGION 1..12: note = Table B: HLA-DRB1*04:02L HLA-DRB1*08:01L
  source 1..12: note = Severe acute respiratory syndrome coronavirus 2
GHSYGADLKSFD

SEQ ID NO: 16308 - protein, 11 aa, Severe acute respiratory syndrome-related coronavirus
  REGION 1..11: note = Table B: HLA-DRB1*04:02L HLA-DRB1*01:02L HLA-DRB1*14:17L
  source 1..11: note = Severe acute respiratory syndrome coronavirus 2
LMRELNGGAYT

SEQ ID NO: 16309 - protein, 11 aa, Severe acute respiratory syndrome-related coronavirus
  REGION 1..11: note = Table B: HLA-DRB1*04:02L HLA-DRB1*04:05L HLA-DRB1*16:01L HLA-DQA1*02:01-B1*03:03L
  source 1..11: note = Severe acute respiratory syndrome coronavirus 2
EQLDFIDTKRG

SEQ ID NO: 16310 - protein, 14 aa, Severe acute respiratory syndrome-related coronavirus
  REGION 1..14: note = Table B: HLA-DRB1*04:02L HLA-DRB1*04:04L HLA-DRB1*04:05L HLA-DRB1*01:02L HLA-DRB1*04:10L HLA-DRB1*14:17L HLA-DRB1*04:08L
  source 1..14: note = Severe acute respiratory syndrome coronavirus 2
NSEVGPEHSLAEYH

SEQ ID NO: 16311 - protein, 14 aa, Severe acute respiratory syndrome-related coronavirus
  REGION 1..14: note = Table B: HLA-DRB1*04:02L HLA-DRB1*04:04L HLA-DRB1*04:05L HLA-DRB1*01:02L HLA-DRB1*04:10L HLA-DRB1*14:17L HLA-DRB1*04:08L
  source 1..14: note = Severe acute respiratory syndrome coronavirus 2
SEVGPEHSLAEYHN

SEQ ID NO: 16312 - protein, 12 aa, Severe acute respiratory syndrome-related coronavirus
  REGION 1..12: note = Table B: HLA-DRB1*04:02L HLA-DRB1*14:01L HLA-DRB1*08:01L HLA-DRB1*12:01L HLA-DRB1*14:54L HLA-DRB1*16:01L HLA-DRB1*15:03L
  source 1..12: note = Severe acute respiratory syndrome coronavirus 2
DNLLEILQKEKV

SEQ ID NO: 16313 - protein, 13 aa, Severe acute respiratory syndrome-related coronavirus
  REGION 1..13: note = Table B: HLA-DRB1*04:02L HLA-DRB1*04:04L HLA-DRB1*01:02L
  source 1..13: note = Severe acute respiratory syndrome coronavirus 2
EEIAIILASFSAS

SEQ ID NO: 16314 - protein, 12 aa, Severe acute respiratory syndrome-related coronavirus
  REGION 1..12: note = Table B: HLA-DRB1*04:02L
  source 1..12: note = Severe acute respiratory syndrome coronavirus 2
AIILASFSASTS

SEQ ID NO: 16315 - protein, 12 aa, Severe acute respiratory syndrome-related coronavirus
  REGION 1..12: note = Table B: HLA-DRB1*04:02L HLA-DQA1*01:02-B1*06:02L HLA-DQA1*05:05-B1*03:19L HLA-DQA1*05:05-B1*03:01L HLA-DQA1*02:01-B1*03:03L
  source 1..12: note = Severe acute respiratory syndrome coronavirus 2
IILASFSASTSA

SEQ ID NO: 16316 - protein, 11 aa, Severe acute respiratory syndrome-related coronavirus
  REGION 1..11: note = Table B: HLA-DRB1*04:02L
  source 1..11: note = Severe acute respiratory syndrome coronavirus 2
STSAFVETVKG

SEQ ID NO: 16317 - protein, 14 aa, Severe acute respiratory syndrome-related coronavirus
  REGION 1..14: note = Table B: HLA-DRB1*04:02L HLA-DRB1*01:02L
  source 1..14: note = Severe acute respiratory syndrome coronavirus 2
GAWNIGEQKSILSP

SEQ ID NO: 16318 - protein, 13 aa, Severe acute respiratory syndrome-related coronavirus
  REGION 1..13: note = Table B: HLA-DRB1*04:02L HLA-DRB1*04:04L HLA-DRB1*04:05L HLA-DRB1*01:02L HLA-DRB1*04:10L HLA-DRB1*12:01L HLA-DQA1*05:05-B1*03:01L HLA-DRB1*16:01L HLA-DRB1*04:08L
  source 1..13: note = Severe acute respiratory syndrome coronavirus 2
KSILSPLYAFASE

SEQ ID NO: 16319 - protein, 14 aa, Severe acute respiratory syndrome-related coronavirus
  REGION 1..14: note = Table B: HLA-DRB1*04:02L HLA-DRB1*01:02L HLA-DQA1*05:05-B1*03:19L HLA-DPA1*03:01-B1*105:01L HLA-DQA1*05:05-B1*03:01L HLA-DQA1*01:03-B1*06:01L HLA-DQA1*02:01-B1*03:03L HLA-DRB1*15:03L
  source 1..14: note = Severe acute respiratory syndrome coronavirus 2
SILSPLYAFASEAA

SEQ ID NO: 16320 - protein, 11 aa, Severe acute respiratory syndrome-related coronavirus
  REGION 1..11: note = Table B: HLA-DRB1*04:02L HLA-DRB1*04:05L HLA-DRB4*03:01NL HLA-DQA1*05:01-B1*02:01L HLA-DRB1*04:10L HLA-DRB1*12:01L HLA-DQA1*03:01-B1*03:02L HLA-DRB1*14:54L HLA-DRB1*16:01L HLA-DQA1*02:01-B1*03:03L
  source 1..11: note = Severe acute respiratory syndrome coronavirus 2
AAITILDGISQ

SEQ ID NO: 16321 - protein, 11 aa, Severe acute respiratory syndrome-related coronavirus
  REGION 1..11: note = Table B: HLA-DRB1*04:02L HLA-DRB1*04:04L HLA-DRB1*04:05L HLA-DRB1*01:02L HLA-DQA1*03:01-B1*03:02L HLA-DRB1*14:54L HLA-DRB1*14:17L HLA-DRB1*04:08L
  source 1..11: note = Severe acute respiratory syndrome coronavirus 2
ITILDGISQYS

SEQ ID NO: 16322 - protein, 13 aa, Severe acute respiratory syndrome-related coronavirus
  REGION 1..13: note = Table B: HLA-DRB1*04:02L HLA-DQA1*01:02-B1*06:02L HLA-DRB1*01:02L HLA-DRB1*08:01L HLA-DRB1*04:10L HLA-DQA1*03:01-B1*03:02L HLA-DRB1*14:17L HLA-DRB1*16:01L HLA-DRB1*04:08L HLA-DQA1*02:01-B1*03:03L HLA-DRB1*15:03L
  source 1..13: note = Severe acute respiratory syndrome coronavirus 2
EKLKPVLDWLEEK

SEQ ID NO: 16323 - protein, 12 aa, Severe acute respiratory syndrome-related coronavirus
  REGION 1..12: note = Table B: HLA-DRB1*04:02L HLA-DRB1*08:04L HLA-DRB3*02:01L HLA-DRB1*11:02L HLA-DRB1*08:01L HLA-DRB1*09:01L HLA-DRB1*14:54L
  source 1..12: note = Severe acute respiratory syndrome coronavirus 2
GETFVTHSKGLY

SEQ ID NO: 16324 - protein, 13 aa, Severe acute respiratory syndrome-related coronavirus
  REGION 1..13: note = Table B: HLA-DRB1*04:02L HLA-DRB1*04:05L HLA-DRB1*14:01L HLA-DRB1*12:01L HLA-DRB1*14:17L HLA-DRB1*16:01L HLA-DQA1*01:03-B1*06:01L HLA-DRB1*15:03L
  source 1..13: note = Severe acute respiratory syndrome coronavirus 2
TEEVVLKTGDLQP

SEQ ID NO: 16325 - protein, 13 aa, Severe acute respiratory syndrome-related coronavirus
  REGION 1..13: note = Table B: HLA-DRB1*04:02L HLA-DRB1*12:01L HLA-DQA1*05:05-B1*03:01L HLA-DRB1*16:01L
  source 1..13: note = Severe acute respiratory syndrome coronavirus 2
EEVVLKTGDLQPL

SEQ ID NO: 16326 - protein, 13 aa, Severe acute respiratory syndrome-related coronavirus
  REGION 1..13: note = Table B: HLA-DRB1*04:02L HLA-DRB1*04:04L HLA-DRB1*08:01L
  source 1..13: note = Severe acute respiratory syndrome coronavirus 2
GLMLLEIKDTEKY

SEQ ID NO: 16327 - protein, 13 aa, Severe acute respiratory syndrome-related coronavirus
  REGION 1..13: note = Table B: HLA-DRB1*04:02L HLA-DRB1*04:04L HLA-DPA1*03:01-B1*04:02L HLA-DPA1*01:03-B1*04:02L HLA-DPA1*02:01-B1*13:01L HLA-DRB1*14:17L HLA-DPA1*01:02-B1*04:01L HLA-DRB1*10:01L
  source 1..13: note = Severe acute respiratory syndrome coronavirus 2
NEFACVVADAVIK

SEQ ID NO: 16328 - protein, 14 aa, Severe acute respiratory syndrome-related coronavirus
  REGION 1..14: note = Table B: HLA-DRB1*04:02L HLA-DRB1*04:05L HLA-DQA1*01:02-B1*06:02L HLA-DRB1*01:02L HLA-DPA1*03:01-B1*105:01L HLA-DQA1*01:03-B1*06:01L HLA-DQA1*02:01-B1*03:03L
  source 1..14: note = Severe acute respiratory syndrome coronavirus 2
IKTLQPVSELLTPL

SEQ ID NO: 16329 - protein, 13 aa, Severe acute respiratory syndrome-related coronavirus
  REGION 1..13: note = Table B: HLA-DRB1*04:02L HLA-DRB1*04:04L HLA-DRB1*04:05L HLA-DQA1*01:02-B1*06:02L HLA-DRB1*04:10L HLA-DPA1*03:01-B1*105:01L HLA-DRB1*14:17L HLA-DRB1*16:01L
  source 1..13: note = Severe acute respiratory syndrome coronavirus 2
QPVSELLTPLGID

SEQ ID NO: 16330 - protein, 13 aa, Severe acute respiratory syndrome-related coronavirus
  REGION 1..13: note = Table B: HLA-DRB1*04:02L HLA-DRB1*04:05L HLA-DPA1*01:03-B1*03:01L HLA-DRB1*08:01L HLA-DPA1*01:03-B1*04:02L HLA-DRB1*12:01L
  source 1..13: note = Severe acute respiratory syndrome coronavirus 2
FGATSAALQPEEE

SEQ ID NO: 16331 - protein, 13 aa, Severe acute respiratory syndrome-related coronavirus
  REGION 1..13: note = Table B: HLA-DRB1*04:02L HLA-DRB1*04:05L HLA-DRB4*03:01NL HLA-DPA1*01:03-B1*03:01L HLA-DRB1*08:01L HLA-DQA1*01-B1*05L HLA-DRB1*04:10L HLA-DPA1*01:03-B1*04:02L HLA-DRB1*12:01L
  source 1..13: note = Severe acute respiratory syndrome coronavirus 2
GATSAALQPEEEQ

SEQ ID NO: 16332 - protein, 12 aa, Severe acute respiratory syndrome-related coronavirus
  REGION 1..12: note = Table B: HLA-DRB1*04:02L HLA-DQA1*05:01-B1*02:01L HLA-DQA1*01:03-B1*06:01L
  source 1..12: note = Severe acute respiratory syndrome coronavirus 2
TTIQTIVEVQPQ

SEQ ID NO: 16333 - protein, 13 aa, Severe acute respiratory syndrome-related coronavirus
  REGION 1..13: note = Table B: HLA-DRB1*04:02L HLA-DRB1*01:02L
  source 1..13: note = Severe acute respiratory syndrome coronavirus 2
PQLEMELTPVVQT

SEQ ID NO: 16334 - protein, 14 aa, Severe acute respiratory syndrome-related coronavirus
  REGION 1..14: note = Table B: HLA-DRB1*04:02L HLA-DRB1*01:02L HLA-DPA1*01:03-B1*03:01L HLA-DQA1*01-B1*05L HLA-DRB1*12:01L HLA-DRB1*04:08L
  source 1..14: note = Severe acute respiratory syndrome coronavirus 2
EMELTPVVQTIEVN

SEQ ID NO: 16335 - protein, 12 aa, Severe acute respiratory syndrome-related coronavirus
  REGION 1..12: note = Table B: HLA-DRB1*04:02L HLA-DRB1*01:02L HLA-DQA1*05:05-B1*03:01L HLA-DRB1*14:17L
  source 1..12: note = Severe acute respiratory syndrome coronavirus 2
PVVQTIEVNSFS

SEQ ID NO: 16336 - protein, 13 aa, Severe acute respiratory syndrome-related coronavirus
  REGION 1..13: note = Table B: HLA-DRB1*04:02L HLA-DRB1*08:01L
  source 1..13: note = Severe acute respiratory syndrome coronavirus 2
NADIVEEAKKVKP

SEQ ID NO: 16337 - protein, 12 aa, Severe acute respiratory syndrome-related coronavirus
  REGION 1..12: note = Table B: HLA-DRB1*04:02L HLA-DRB1*04:05L HLA-DRB1*01:02L HLA-DRB1*08:04L HLA-DRB1*11:03L HLA-DRB1*14:17L HLA-DRB1*07:01L
  source 1..12: note = Severe acute respiratory syndrome coronavirus 2
KPTVVVNAANVY

SEQ ID NO: 16338 - protein, 13 aa, Severe acute respiratory syndrome-related coronavirus
  REGION 1..13: note = Table B: HLA-DRB1*04:02L HLA-DRB1*04:10L HLA-DRB1*14:17L
  source 1..13: note = Severe acute respiratory syndrome coronavirus 2
NAMQVESDDYIAT

SEQ ID NO: 16339 - protein, 11 aa, Severe acute respiratory syndrome-related coronavirus
  REGION 1..11: note = Table B: HLA-DRB1*04:02L HLA-DRB1*04:05L HLA-DRB1*04:10L HLA-DQA1*03:01-B1*03:02L HLA-DRB1*14:54L
  source 1..11: note = Severe acute respiratory syndrome coronavirus 2
EDIQLLKSAYE

SEQ ID NO: 16340 - protein, 11 aa, Severe acute respiratory syndrome-related coronavirus
  REGION 1..11: note = Table B: HLA-DRB1*04:02L HLA-DRB1*14:17L
  source 1..11: note = Severe acute respiratory syndrome coronavirus 2
YLAVFDKNLYD

SEQ ID NO: 16341 - protein, 15 aa, Severe acute respiratory syndrome-related coronavirus
  REGION 1..15: note = Table B: HLA-DRB1*04:02L HLA-DRB1*01:02L HLA-DRB1*04:08L
  source 1..15: note = Severe acute respiratory syndrome coronavirus 2
TENLLLYIDINGNLH

SEQ ID NO: 16342 - protein, 12 aa, Severe acute respiratory syndrome-related coronavirus
  REGION 1..12: note = Table B: HLA-DRB1*04:02L HLA-DQA1*05:05-B1*03:01L HLA-DQA1*01:03-B1*06:01L
  source 1..12: note = Severe acute respiratory syndrome coronavirus 2
DVVQEGVLTAVV

SEQ ID NO: 16343 - protein, 13 aa, Severe acute respiratory syndrome-related coronavirus
  REGION 1..13: note = Table B: HLA-DRB1*04:02L HLA-DRB1*04:05L HLA-DRB1*01:02L HLA-DRB3*01:01L HLA-DRB1*04:08L
  source 1..13: note = Severe acute respiratory syndrome coronavirus 2
KALRKVPTDNYIT

SEQ ID NO: 16344 - protein, 11 aa, Severe acute respiratory syndrome-related coronavirus
  REGION 1..11: note = Table B: HLA-DRB1*04:02L HLA-DQA1*05:01-B1*02:01L HLA-DRB1*14:17L HLA-DQA1*01:03-B1*06:01L
  source 1..11: note = Severe acute respiratory syndrome coronavirus 2
GLNGYTVEEAK

SEQ ID NO: 16345 - protein, 11 aa, Severe acute respiratory syndrome-related coronavirus
  REGION 1..11: note = Table B: HLA-DRB1*04:02L HLA-DRB1*04:05L HLA-DRB4*03:01NL HLA-DQA1*05:01-B1*02:01L HLA-DRB1*04:10L HLA-DQA1*03:01-B1*03:02L
  source 1..11: note = Severe acute respiratory syndrome coronavirus 2
SLINTLNDLNE

SEQ ID NO: 16346 - protein, 13 aa, Severe acute respiratory syndrome-related coronavirus
  REGION 1..13: note = Table B: HLA-DRB1*04:02L HLA-DRB1*04:05L HLA-DRB1*01:02L HLA-DQA1*03:01-B1*03:02L HLA-DRB1*14:17L HLA-DRB1*04:08L
  source 1..13: note = Severe acute respiratory syndrome coronavirus 2
NETLVTMPLGYVT

SEQ ID NO: 16347 - protein, 13 aa, Severe acute respiratory syndrome-related coronavirus
  REGION 1..13: note = Table B: HLA-DRB1*04:02L HLA-DRB1*04:05L HLA-DRB3*02:01L HLA-DRB1*12:02L HLA-DRB1*14:54L HLA-DRB1*14:17L HLA-DRB1*04:08L
  source 1..13: note = Severe acute respiratory syndrome coronavirus 2
VTHGLNLEEAARY

SEQ ID NO: 16348 - protein, 13 aa, Severe acute respiratory syndrome-related coronavirus
  REGION 1..13: note = Table B: HLA-DRB1*04:02L HLA-DRB1*04:05L HLA-DRB1*01:02L HLA-DPA1*03:01-B1*04:02L HLA-DQA1*01:01-B1*05:01L HLA-DRB1*04:10L HLA-DRB1*14:54L HLA-DQA1*05:05-B1*03:01L HLA-DRB1*14:17L HLA-DRB1*04:08L HLA-DRB1*15:01L
  source 1..13: note = Severe acute respiratory syndrome coronavirus 2
SPDAVTAYNGYLT

SEQ ID NO: 16349 - protein, 13 aa, Severe acute respiratory syndrome-related coronavirus
  REGION 1..13: note = Table B: HLA-DRB1*04:02L
  source 1..13: note = Severe acute respiratory syndrome coronavirus 2
PDAVTAYNGYLTS

SEQ ID NO: 16350 - protein, 12 aa, Severe acute respiratory syndrome-related coronavirus
  REGION 1..12: note = Table B: HLA-DRB1*04:02L HLA-DQA1*01-B1*05L HLA-DRB1*16:01L HLA-DRB1*15:03L
  source 1..12: note = Severe acute respiratory syndrome coronavirus 2
VTAYNGYLTSSS

SEQ ID NO: 16351 - protein, 13 aa, Severe acute respiratory syndrome-related coronavirus
  REGION 1..13: note = Table B: HLA-DRB1*04:02L HLA-DPA1*03:01-B1*105:01L HLA-DRB1*14:17L
  source 1..13: note = Severe acute respiratory syndrome coronavirus 2
GSYKDWSYSGQST

SEQ ID NO: 16352 - protein, 13 aa, Severe acute respiratory syndrome-related coronavirus
  REGION 1..13: note = Table B: HLA-DRB1*04:02L HLA-DRB1*08:04L HLA-DRB1*04:08L
  source 1..13: note = Severe acute respiratory syndrome coronavirus 2
TFHLDGEVITFDN

SEQ ID NO: 16353 - protein, 14 aa, Severe acute respiratory syndrome-related coronavirus
  REGION 1..14: note = Table B: HLA-DRB1*04:02L HLA-DRB1*04:04L HLA-DRB1*08:04L HLA-DRB1*08:01L HLA-DPA1*02:01-B1*13:01L HLA-DPA1*01:03-B1*104:01L
  source 1..14: note = Severe acute respiratory syndrome coronavirus 2
LREVRTIKVFTTVD

SEQ ID NO: 16354 - protein, 11 aa, Severe acute respiratory syndrome-related coronavirus
  REGION 1..11: note = Table B: HLA-DRB1*04:02L HLA-DRB1*14:17L
  source 1..11: note = Severe acute respiratory syndrome coronavirus 2
RTIKVFTTVDN

SEQ ID NO: 16355 - protein, 11 aa, Severe acute respiratory syndrome-related coronavirus
  REGION 1..11: note = Table B: HLA-DRB1*04:02L HLA-DRB1*14:17L HLA-DQA1*02:01-B1*03:03L
  source 1..11: note = Severe acute respiratory syndrome coronavirus 2
PTYLDGADVTK

SEQ ID NO: 16356 - protein, 13 aa, Severe acute respiratory syndrome-related coronavirus
  REGION 1..13: note = Table B: HLA-DRB1*04:02L
  source 1..13: note = Severe acute respiratory syndrome coronavirus 2
DGADVTKIKPHNS

SEQ ID NO: 16357 - protein, 13 aa, Severe acute respiratory syndrome-related coronavirus
  REGION 1..13: note = Table B: HLA-DRB1*04:02L HLA-DRB1*04:04L HLA-DRB1*04:05L HLA-DRB1*14:01L HLA-DRB1*08:01L HLA-DRB1*12:01L HLA-DRB1*16:01L HLA-DQA1*01:03-B1*06:01L HLA-DRB1*15:03L
  source 1..13: note = Severe acute respiratory syndrome coronavirus 2
GADVTKIKPHNSH

SEQ ID NO: 16358 - protein, 12 aa, Severe acute respiratory syndrome-related coronavirus
  REGION 1..12: note = Table B: HLA-DRB1*04:02L HLA-DRB1*04:04L HLA-DRB1*04:05L HLA-DRB1*01:02L HLA-DRB1*14:01L HLA-DRB1*11:04L HLA-DRB1*08:01L HLA-DRB1*12:01L HLA-DRB3*01:01L HLA-DRB1*16:01L HLA-DRB1*04:08L HLA-DQA1*02:01-B1*03:03L HLA-DRB1*15:03L
  source 1..12: note = Severe acute respiratory syndrome coronavirus 2
KIKPHNSHEGKT

SEQ ID NO: 16359 - protein, 11 aa, Severe acute respiratory syndrome-related coronavirus
  REGION 1..11: note = Table B: HLA-DRB1*04:02L HLA-DRB1*11:04L HLA-DRB1*12:02L HLA-DPA1*01:03-B1*104:01L HLA-DRB1*04:08L
  source 1..11: note = Severe acute respiratory syndrome coronavirus 2
EYYHTTDPSFL

SEQ ID NO: 16360 - protein, 11 aa, Severe acute respiratory syndrome-related coronavirus
  REGION 1..11: note = Table B: HLA-DRB1*04:02L HLA-DRB4*03:01NL HLA-DRB1*14:17L
  source 1..11: note = Severe acute respiratory syndrome coronavirus 2
YYHTTDPSFLG

SEQ ID NO: 16361 - protein, 13 aa, Severe acute respiratory syndrome-related coronavirus
  REGION 1..13: note = Table B: HLA-DRB1*04:02L HLA-DRB1*04:05L HLA-DRB1*01:02L HLA-DRB3*02:01L HLA-DRB1*14:01L HLA-DRB1*04:10L HLA-DRB1*12:02L HLA-DRB1*14:54L HLA-DQA1*05:05-B1*03:01L HLA-DRB1*14:17L HLA-DPA1*01:02-B1*04:01L
  source 1..13: note = Severe acute respiratory syndrome coronavirus 2
VEAVMYMGTLSYE

SEQ ID NO: 16362 - protein, 12 aa, Severe acute respiratory syndrome-related coronavirus
  REGION 1..12: note = Table B: HLA-DRB1*04:02L HLA-DRB1*14:01L HLA-DRB1*14:54L
  source 1..12: note = Severe acute respiratory syndrome coronavirus 2
AVMYMGTLSYEQ

SEQ ID NO: 16363 - protein, 11 aa, Severe acute respiratory syndrome-related coronavirus
  REGION 1..11: note = Table B: HLA-DRB1*04:02L
  source 1..11: note = Severe acute respiratory syndrome coronavirus 2
TKYLVQQESPF

SEQ ID NO: 16364 - protein, 11 aa, Severe acute respiratory syndrome-related coronavirus
  REGION 1..11: note = Table B: HLA-DRB1*04:02L HLA-DQA1*03:01-B1*03:02L HLA-DRB1*14:17L
  source 1..11: note = Severe acute respiratory syndrome coronavirus 2
VMMSAPPAQYE

SEQ ID NO: 16365 - protein, 12 aa, Severe acute respiratory syndrome-related coronavirus
  REGION 1..12: note = Table B: HLA-DRB1*04:02L HLA-DRB1*01:02L HLA-DQA1*01-B1*05L HLA-DQA1*05:01-B1*02:01L HLA-DRB1*12:01L HLA-DPA1*03:01-B1*105:01L HLA-DQA1*03:01-B1*03:02L HLA-DRB1*14:17L HLA-DRB1*16:01L HLA-DQA1*02:01-B1*03:03L
  REGION 1..12: note = CONT. FROM ABOVE: HLA-DRB1*15:03L
  source 1..12: note = Severe acute respiratory syndrome coronavirus 2
DVFYKENSYTTT

SEQ ID NO: 16366 - protein, 12 aa, Severe acute respiratory syndrome-related coronavirus
  REGION 1..12: note = Table B: HLA-DRB1*04:02L HLA-DRB1*04:05L
  source 1..12: note = Severe acute respiratory syndrome coronavirus 2
TTIKPVTYKLDG

SEQ ID NO: 16367 - protein, 12 aa, Severe acute respiratory syndrome-related coronavirus
  REGION 1..12: note = Table B: HLA-DRB1*04:02L HLA-DQA1*01:02-B1*06:02L HLA-DRB1*01:02L HLA-DRB1*14:01L HLA-DRB1*04:08L
  source 1..12: note = Severe acute respiratory syndrome coronavirus 2
QLTGYKKPASRE

SEQ ID NO: 16368 - protein, 13 aa, Severe acute respiratory syndrome-related coronavirus
  REGION 1..13: note = Table B: HLA-DRB1*04:02L HLA-DRB1*04:05L HLA-DRB1*01:02L HLA-DRB1*12:01L HLA-DPA1*02:01-B1*13:01L
  source 1..13: note = Severe acute respiratory syndrome coronavirus 2
ELKVTFFPDLNGD

SEQ ID NO: 16369 - protein, 12 aa, Severe acute respiratory syndrome-related coronavirus
  REGION 1..12: note = Table B: HLA-DRB1*04:02L HLA-DRB1*04:05L HLA-DQA1*05:05-B1*03:01L HLA-DRB1*14:17L
  source 1..12: note = Severe acute respiratory syndrome coronavirus 2
STKPVETSNSFD

SEQ ID NO: 16370 - protein, 11 aa, Severe acute respiratory syndrome-related coronavirus
  REGION 1..11: note = Table B: HLA-DRB1*04:02L HLA-DQA1*01-B1*05L HLA-DQA1*05:01-B1*02:01L HLA-DQA1*02:01-B1*03:03L
  source 1..11: note = Severe acute respiratory syndrome coronavirus 2
SFDVLKSEDAQ

SEQ ID NO: 16371 - protein, 11 aa, Severe acute respiratory syndrome-related coronavirus
  REGION 1..11: note = Table B: HLA-DRB1*04:02L HLA-DRB1*14:17L HLA-DQA1*01:03-B1*06:01L HLA-DQA1*02:01-B1*03:03L
  source 1..11: note = Severe acute respiratory syndrome coronavirus 2
LKSEDAQGMDN

SEQ ID NO: 16372 - protein, 13 aa, Severe acute respiratory syndrome-related coronavirus
  REGION 1..13: note = Table B: HLA-DRB1*04:02L HLA-DRB1*01:02L HLA-DQA1*05:01-B1*02:01L HLA-DRB1*12:01L HLA-DRB1*16:01L
  source 1..13: note = Severe acute respiratory syndrome coronavirus 2
NNSLKITEEVGHT

SEQ ID NO: 16373 - protein, 13 aa, Severe acute respiratory syndrome-related coronavirus
  REGION 1..13: note = Table B: HLA-DRB1*04:02L HLA-DRB1*04:05L HLA-DRB1*01:02L HLA-DPA1*01:03-B1*03:01L HLA-DRB1*08:01L HLA-DPA1*01:03-B1*04:02L HLA-DRB1*12:01L HLA-DRB1*14:17L HLA-DRB1*04:08L
  source 1..13: note = Severe acute respiratory syndrome coronavirus 2
VGHTDLMAAYVDN

SEQ ID NO: 16374 - protein, 12 aa, Severe acute respiratory syndrome-related coronavirus
  REGION 1..12: note = Table B: HLA-DRB1*04:02L HLA-DRB1*04:05L HLA-DQA1*01:02-B1*06:02L HLA-DPA1*03:01-B1*04:02L HLA-DRB1*04:10L HLA-DRB1*12:01L HLA-DPA1*02:01-B1*13:01L HLA-DPA1*03:01-B1*105:01L HLA-DRB1*14:17L HLA-DRB1*16:01L
  source 1..12: note = Severe acute respiratory syndrome coronavirus 2
DLMAAYVDNSSL

SEQ ID NO: 16375 - protein, 11 aa, Severe acute respiratory syndrome-related coronavirus
  REGION 1..11: note = Table B: HLA-DRB1*04:02L HLA-DRB1*04:05L HLA-DRB4*03:01NL HLA-DRB1*04:10L HLA-DRB1*14:54L HLA-DRB1*14:17L HLA-DRB1*16:01L
  source 1..11: note = Severe acute respiratory syndrome coronavirus 2
MAAYVDNSSLT

SEQ ID NO: 16376 - protein, 12 aa, Severe acute respiratory syndrome-related coronavirus
  REGION 1..12: note = Table B: HLA-DRB1*04:02L HLA-DRB1*04:05L HLA-DQA1*01:02-B1*06:02L HLA-DRB4*03:01NL HLA-DQA1*05:01-B1*02:01L HLA-DRB1*04:10L HLA-DRB1*12:01L HLA-DQA1*03:01-B1*03:02L HLA-DRB1*14:54L
  REGION 1..12: note = CONT. FROM ABOVE: HLA-DQA1*02:01-B1*03:03L
  source 1..12: note = Severe acute respiratory syndrome coronavirus 2
LGSLIYSTAALG

SEQ ID NO: 16377 - protein, 12 aa, Severe acute respiratory syndrome-related coronavirus
  REGION 1..12: note = Table B: HLA-DRB1*04:02L HLA-DRB1*04:10L HLA-DRB1*14:54L
  source 1..12: note = Severe acute respiratory syndrome coronavirus 2
LGVLMSNLGMPS

SEQ ID NO: 16378 - protein, 12 aa, Severe acute respiratory syndrome-related coronavirus
  REGION 1..12: note = Table B: HLA-DRB1*04:02L HLA-DRB1*12:02L HLA-DRB1*14:54L
  source 1..12: note = Severe acute respiratory syndrome coronavirus 2
SDEVARDLSLQF

SEQ ID NO: 16379 - protein, 12 aa, Severe acute respiratory syndrome-related coronavirus
  REGION 1..12: note = Table B: HLA-DRB1*04:02L HLA-DRB1*08:04L HLA-DRB1*11:03L HLA-DRB1*11:04L HLA-DRB1*08:01L HLA-DRB1*11:01L HLA-DRB1*13:01L HLA-DRB1*12:02L HLA-DRB1*14:54L HLA-DRB1*14:17L HLA-DRB1*04:08L
  source 1..12: note = Severe acute respiratory syndrome coronavirus 2
DEVARDLSLQFK

SEQ ID NO: 16380 - protein, 13 aa, Severe acute respiratory syndrome-related coronavirus
  REGION 1..13: note = Table B: HLA-DRB1*04:02L HLA-DQA1*01:02-B1*06:02L HLA-DRB1*14:01L HLA-DRB1*08:01L HLA-DRB1*16:01L
  source 1..13: note = Severe acute respiratory syndrome coronavirus 2
DLSLQFKRPINPT

SEQ ID NO: 16381 - protein, 12 aa, Severe acute respiratory syndrome-related coronavirus
  REGION 1..12: note = Table B: HLA-DRB1*04:02L HLA-DRB1*14:17L
  source 1..12: note = Severe acute respiratory syndrome coronavirus 2
VKMFDAYVNTFS

SEQ ID NO: 16382 - protein, 13 aa, Severe acute respiratory syndrome-related coronavirus
  REGION 1..13: note = Table B: HLA-DRB1*04:02L
  source 1..13: note = Severe acute respiratory syndrome coronavirus 2
KMFDAYVNTFSST

SEQ ID NO: 16383 - protein, 13 aa, Severe acute respiratory syndrome-related coronavirus
  REGION 1..13: note = Table B: HLA-DRB1*04:02L
  source 1..13: note = Severe acute respiratory syndrome coronavirus 2
TAEAELAKNVSLD

SEQ ID NO: 16384 - protein, 12 aa, Severe acute respiratory syndrome-related coronavirus
  REGION 1..12: note = Table B: HLA-DRB1*04:02L HLA-DRB1*04:05L HLA-DRB1*14:17L
  source 1..12: note = Severe acute respiratory syndrome coronavirus 2
LAKNVSLDNVLS

SEQ ID NO: 16385 - protein, 12 aa, Severe acute respiratory syndrome-related coronavirus
  REGION 1..12: note = Table B: HLA-DRB1*04:02L HLA-DRB1*04:05L HLA-DRB4*03:01NL HLA-DQA1*05:01-B1*02:01L HLA-DRB1*04:10L HLA-DRB1*12:01L HLA-DRB1*14:54L HLA-DRB1*16:01L HLA-DQA1*02:01-B1*03:03L
  source 1..12: note = Severe acute respiratory syndrome coronavirus 2
AKNVSLDNVLST

SEQ ID NO: 16386 - protein, 11 aa, Severe acute respiratory syndrome-related coronavirus
  REGION 1..11: note = Table B: HLA-DRB1*04:02L HLA-DRB1*14:17L
  source 1..11: note = Severe acute respiratory syndrome coronavirus 2
HNIALIWNVKD

SEQ ID NO: 16387 - protein, 13 aa, Severe acute respiratory syndrome-related coronavirus
  REGION 1..13: note = Table B: HLA-DRB1*04:02L
  source 1..13: note = Severe acute respiratory syndrome coronavirus 2
VHVMSKHTDFSSE

SEQ ID NO: 16388 - protein, 14 aa, Severe acute respiratory syndrome-related coronavirus
  REGION 1..14: note = Table B: HLA-DRB1*04:02L HLA-DRB1*01:02L HLA-DRB1*04:08L
  source 1..14: note = Severe acute respiratory syndrome coronavirus 2
DTNVLEGSVAYESL

SEQ ID NO: 16389 - protein, 13 aa, Severe acute respiratory syndrome-related coronavirus
  REGION 1..13: note = Table B: HLA-DRB1*04:02L HLA-DQA1*01-B1*05L HLA-DPA1*01:03-B1*04:02L HLA-DRB1*04:08L
  source 1..13: note = Severe acute respiratory syndrome coronavirus 2
DAVNLLTNMFTPL

SEQ ID NO: 16390 - protein, 14 aa, Severe acute respiratory syndrome-related coronavirus
  REGION 1..14: note = Table B: HLA-DRB1*04:02L HLA-DRB1*04:04L HLA-DRB1*04:05L HLA-DRB1*01:02L HLA-DRB1*14:01L HLA-DPA1*01:03-B1*04:01L HLA-DPA1*01:03-B1*04:02L
  source 1..14: note = Severe acute respiratory syndrome coronavirus 2
VNLLTNMFTPLIQP

SEQ ID NO: 16391 - protein, 15 aa, Severe acute respiratory syndrome-related coronavirus
  REGION 1..15: note = Table B: HLA-DRB1*04:02L HLA-DRB1*01:02L HLA-DRB1*04:10L HLA-DRB1*12:01L HLA-DQA1*02:01-B1*03:03L
  source 1..15: note = Severe acute respiratory syndrome coronavirus 2
QPIGALDISASIVAG

SEQ ID NO: 16392 - protein, 14 aa, Severe acute respiratory syndrome-related coronavirus
  REGION 1..14: note = Table B: HLA-DRB1*04:02L HLA-DRB1*01:02L
  source 1..14: note = Severe acute respiratory syndrome coronavirus 2
IGALDISASIVAGG

SEQ ID NO: 16393 - protein, 14 aa, Severe acute respiratory syndrome-related coronavirus
  REGION 1..14: note = Table B: HLA-DRB1*04:02L HLA-DRB1*01:02L
  source 1..14: note = Severe acute respiratory syndrome coronavirus 2
GALDISASIVAGGI

SEQ ID NO: 16394 - protein, 13 aa, Severe acute respiratory syndrome-related coronavirus
  REGION 1..13: note = Table B: HLA-DRB1*04:02L HLA-DRB1*01:02L
  source 1..13: note = Severe acute respiratory syndrome coronavirus 2
LDISASIVAGGIV

SEQ ID NO: 16395 - protein, 15 aa, Severe acute respiratory syndrome-related coronavirus
  REGION 1..15: note = Table B: HLA-DRB1*04:02L
  source 1..15: note = Severe acute respiratory syndrome coronavirus 2
SASIVAGGIVAIVVT

SEQ ID NO: 16396 - protein, 14 aa, Severe acute respiratory syndrome-related coronavirus
  REGION 1..14: note = Table B: HLA-DRB1*04:02L HLA-DRB1*04:04L HLA-DRB1*11:02L HLA-DRB1*11:03L HLA-DQA1*01:01-B1*05:01L HLA-DRB1*09:01L HLA-DRB3*01:01L HLA-DRB1*07:01L HLA-DRB1*10:01L HLA-DRB1*08:02L HLA-DRB1*08:03L
  source 1..14: note = Severe acute respiratory syndrome coronavirus 2
RVVFNGVSFSTFEE

SEQ ID NO: 16397 - protein, 12 aa, Severe acute respiratory syndrome-related coronavirus
  REGION 1..12: note = Table B: HLA-DRB1*04:02L HLA-DRB1*08:04L HLA-DRB3*02:01L HLA-DRB1*11:03L HLA-DRB1*09:01L HLA-DRB1*12:02L HLA-DRB1*14:54L HLA-DRB1*07:01L HLA-DRB1*04:08L
  source 1..12: note = Severe acute respiratory syndrome coronavirus 2
DVLLPLTQYNRY

SEQ ID NO: 16398 - protein, 14 aa, Severe acute respiratory syndrome-related coronavirus
  REGION 1..14: note = Table B: HLA-DRB1*04:02L HLA-DRB1*01:01L HLA-DRB1*08:04L HLA-DRB1*11:03L HLA-DRB1*11:04L HLA-DRB1*13:01L HLA-DRB1*07:01L HLA-DRB1*15:01L
  source 1..14: note = Severe acute respiratory syndrome coronavirus 2
NRYLALYNKYKYFS

SEQ ID NO: 16399 - protein, 13 aa, Severe acute respiratory syndrome-related coronavirus
  REGION 1..13: note = Table B: HLA-DRB1*04:02L HLA-DRB1*04:05L HLA-DQA1*01:02-B1*06:02L HLA-DQA1*01-B1*05L HLA-DQA1*05:01-B1*02:01L HLA-DRB1*04:10L HLA-DQA1*03:01-B1*03:02L HLA-DRB1*14:17L HLA-DRB1*16:01L
  REGION 1..13: note = CONT. FROM ABOVE: HLA-DQA1*01:03-B1*06:01L HLA-DQA1*02:01-B1*03: 03L
  source 1..13: note = Severe acute respiratory syndrome coronavirus 2
HVICTSEDMLNPN

SEQ ID NO: 16400 - protein, 11 aa, Severe acute respiratory syndrome-related coronavirus
  REGION 1..11: note = Table B: HLA-DRB1*04:02L HLA-DRB1*14:01L HLA-DRB1*08:01L
  source 1..11: note = Severe acute respiratory syndrome coronavirus 2
VQLRVIGHSMQ

SEQ ID NO: 16401 - protein, 13 aa, Severe acute respiratory syndrome-related coronavirus
  REGION 1..13: note = Table B: HLA-DRB1*04:02L HLA-DRB1*01:02L HLA-DRB1*14:17L HLA-DRB1*16:01L HLA-DRB1*15:03L
  source 1..13: note = Severe acute respiratory syndrome coronavirus 2
FSVLACYNGSPSG

SEQ ID NO: 16402 - protein, 12 aa, Severe acute respiratory syndrome-related coronavirus
  REGION 1..12: note = Table B: HLA-DRB1*04:02L HLA-DRB1*04:05L HLA-DRB1*01:02L HLA-DRB1*08:04L HLA-DRB1*12:01L HLA-DRB1*16:01L HLA-DRB1*04:08L HLA-DRB1*08:03L
  source 1..12: note = Severe acute respiratory syndrome coronavirus 2
RPNFTIKGSFLN

SEQ ID NO: 16403 - protein, 13 aa, Severe acute respiratory syndrome-related coronavirus
  REGION 1..13: note = Table B: HLA-DRB1*04:02L HLA-DPA1*03:01-B1*105:01L HLA-DPA1*01:02-B1*04:01L HLA-DRB1*16:01L
  source 1..13: note = Severe acute respiratory syndrome coronavirus 2
LEGNFYGPFVDRQ

SEQ ID NO: 16404 - protein, 13 aa, Severe acute respiratory syndrome-related coronavirus
  REGION 1..13: note = Table B: HLA-DRB1*04:02L HLA-DRB1*04:05L HLA-DPA1*03:01-B1*105:01L
  source 1..13: note = Severe acute respiratory syndrome coronavirus 2
EPLTQDHVDILGP

SEQ ID NO: 16405 - protein, 11 aa, Severe acute respiratory syndrome-related coronavirus
  REGION 1..11: note = Table B: HLA-DRB1*04:02L HLA-DRB1*04:05L HLA-DQA1*01-B1*05L HLA-DRB1*04:10L
  source 1..11: note = Severe acute respiratory syndrome coronavirus 2
WLDMVDTSLSG

SEQ ID NO: 16406 - protein, 12 aa, Severe acute respiratory syndrome-related coronavirus
  REGION 1..12: note = Table B: HLA-DRB1*04:02L HLA-DRB1*01:02L HLA-DRB1*14:17L HLA-DRB1*16:01L HLA-DRB1*04:08L
  source 1..12: note = Severe acute respiratory syndrome coronavirus 2
GVVTTVMFLARG

SEQ ID NO: 16407 - protein, 11 aa, Severe acute respiratory syndrome-related coronavirus
  REGION 1..11: note = Table B: HLA-DRB1*04:02L HLA-DQA1*02:01-B1*03:03L
  source 1..11: note = Severe acute respiratory syndrome coronavirus 2
GLLPPKNSIDA

SEQ ID NO: 16408 - protein, 14 aa, Severe acute respiratory syndrome-related coronavirus
  REGION 1..14: note = Table B: HLA-DRB1*04:02L HLA-DPA1*03:01-B1*04:02L HLA-DQA1*05:05-B1*03:19L HLA-DRB1*12:01L HLA-DPA1*03:01-B1*105:01L HLA-DPA1*01:03-B1*02:01L HLA-DQA1*05:05-B1*03:01L
  source 1..14: note = Severe acute respiratory syndrome coronavirus 2
IDAFKLNIKLLGVG

SEQ ID NO: 16409 - protein, 11 aa, Severe acute respiratory syndrome-related coronavirus
  REGION 1..11: note = Table B: HLA-DRB1*04:02L HLA-DRB4*03:01NL HLA-DRB1*14:01L HLA-DQA1*03:01-B1*03:02L HLA-DRB1*16:01L HLA-DQA1*01:03-B1*06:01L HLA-DQA1*02:01-B1*03:03L
  source 1..11: note = Severe acute respiratory syndrome coronavirus 2
SVLQQLRVESS

SEQ ID NO: 16410 - protein, 11 aa, Severe acute respiratory syndrome-related coronavirus
  REGION 1..11: note = Table B: HLA-DRB1*04:02L
  source 1..11: note = Severe acute respiratory syndrome coronavirus 2
VLQQLRVESSS

SEQ ID NO: 16411 - protein, 12 aa, Severe acute respiratory syndrome-related coronavirus
  REGION 1..12: note = Table B: HLA-DRB1*04:02L HLA-DRB1*04:05L HLA-DRB4*03:01NL HLA-DRB1*08:04L HLA-DRB1*04:10L HLA-DRB1*14:54L HLA-DRB1*04:08L
  source 1..12: note = Severe acute respiratory syndrome coronavirus 2
TEAFEKMVSLLS

SEQ ID NO: 16412 - protein, 12 aa, Severe acute respiratory syndrome-related coronavirus
  REGION 1..12: note = Table B: HLA-DRB1*04:02L HLA-DQA1*01:02-B1*06:02L HLA-DRB1*14:17L
  source 1..12: note = Severe acute respiratory syndrome coronavirus 2
LSVLLSMQGAVD

SEQ ID NO: 16413 - protein, 13 aa, Severe acute respiratory syndrome-related coronavirus
  REGION 1..13: note = Table B: HLA-DRB1*04:02L HLA-DRB1*04:05L HLA-DQA1*01:02-B1*06:02L HLA-DRB1*01:02L HLA-DQA1*05:01-B1*02:01L HLA-DRB1*04:10L HLA-DRB1*12:01L HLA-DPA1*03:01-B1*105:01L HLA-DQA1*03:01-B1*03:02L
  REGION 1..13: note = CONT. FROM ABOVE: HLA-DQA1*05:05-B1*03:01L HLA-DRB1*14:17L HLA-D RB1*16:01L HLA-DQA1*02:01-B1*03:03L HLA-DRB1*15:03L
  source 1..13: note = Severe acute respiratory syndrome coronavirus 2
SVLLSMQGAVDIN

SEQ ID NO: 16414 - protein, 11 aa, Severe acute respiratory syndrome-related coronavirus
  REGION 1..11: note = Table B: HLA-DRB1*04:02L HLA-DRB1*04:05L HLA-DRB1*14:17L
  source 1..11: note = Severe acute respiratory syndrome coronavirus 2
AFATAQEAYEQ

SEQ ID NO: 16415 - protein, 13 aa, Severe acute respiratory syndrome-related coronavirus
  REGION 1..13: note = Table B: HLA-DRB1*04:02L HLA-DRB1*04:05L HLA-DRB4*03:01NL HLA-DRB1*04:10L HLA-DRB1*14:17L HLA-DRB1*16:01L
  source 1..13: note = Severe acute respiratory syndrome coronavirus 2
TAQEAYEQAVANG

SEQ ID NO: 16416 - protein, 11 aa, Severe acute respiratory syndrome-related coronavirus
  REGION 1..11: note = Table B: HLA-DRB1*04:02L HLA-DRB1*04:10L
  source 1..11: note = Severe acute respiratory syndrome coronavirus 2
SLNVAKSEFDR

SEQ ID NO: 16417 - protein, 11 aa, Severe acute respiratory syndrome-related coronavirus
  REGION 1..11: note = Table B: HLA-DRB1*04:02L HLA-DRB1*04:05L HLA-DPA1*01:03-B1*03:01L HLA-DRB1*11:04L HLA-DQA1*05:01-B1*02:01L HLA-DRB1*04:08L HLA-DQA1*02:01-B1*03:03L HLA-DRB1*15:03L
  source 1..11: note = Severe acute respiratory syndrome coronavirus 2
EFDRDAAMQRK

SEQ ID NO: 16418 - protein, 11 aa, Severe acute respiratory syndrome-related coronavirus
  REGION 1..11: note = Table B: HLA-DRB1*04:02L HLA-DQA1*01:03-B1*06:01L
  source 1..11: note = Severe acute respiratory syndrome coronavirus 2
DALNNIINNAR

SEQ ID NO: 16419 - protein, 11 aa, Severe acute respiratory syndrome-related coronavirus
  REGION 1..11: note = Table B: HLA-DRB1*04:02L
  source 1..11: note = Severe acute respiratory syndrome coronavirus 2
ALNNIINNARD

SEQ ID NO: 16420 - protein, 12 aa, Severe acute respiratory syndrome-related coronavirus
  REGION 1..12: note = Table B: HLA-DRB1*04:02L HLA-DRB1*04:05L HLA-DRB1*04:10L HLA-DRB1*14:17L
  source 1..12: note = Severe acute respiratory syndrome coronavirus 2
AKLMVVIPDYNT

SEQ ID NO: 16421 - protein, 14 aa, Severe acute respiratory syndrome-related coronavirus
  REGION 1..14: note = Table B: HLA-DRB1*04:02L HLA-DRB1*01:02L HLA-DRB1*08:04L HLA-DPA1*03:01-B1*04:02L HLA-DRB1*12:01L HLA-DPA1*02:01-B1*13:01L HLA-DQA1*05:05-B1*03:01L HLA-DRB1*16:01L HLA-DRB1*15:03L
  source 1..14: note = Severe acute respiratory syndrome coronavirus 2
ASALWEIQQVVDAD

SEQ ID NO: 16422 - protein, 11 aa, Severe acute respiratory syndrome-related coronavirus
  REGION 1..11: note = Table B: HLA-DRB1*04:02L
  source 1..11: note = Severe acute respiratory syndrome coronavirus 2
NSAVKLQNNEL

SEQ ID NO: 16423 - protein, 13 aa, Severe acute respiratory syndrome-related coronavirus
  REGION 1..13: note = Table B: HLA-DRB1*04:02L HLA-DRB1*01:02L HLA-DRB1*12:01L HLA-DQA1*05:05-B1*03:01L
  source 1..13: note = Severe acute respiratory syndrome coronavirus 2
LQNNELSPVALRQ

SEQ ID NO: 16424 - protein, 13 aa, Severe acute respiratory syndrome-related coronavirus
  REGION 1..13: note = Table B: HLA-DRB1*04:02L
  source 1..13: note = Severe acute respiratory syndrome coronavirus 2
NNELSPVALRQMS

SEQ ID NO: 16425 - protein, 17 aa, Severe acute respiratory syndrome-related coronavirus
  REGION 1..17: note = Table B: HLA-DRB1*04:02L HLA-DRB1*01:02L HLA-DRB1*08:01L HLA-DRB4*02:01NL HLA-DRB3*01:01L HLA-DPA1*02:01-B1*13:01L HLA-DPA1*01:03-B1*104:01L
  source 1..17: note = Severe acute respiratory syndrome coronavirus 2
FPKSDGTGTIYTELEPP

SEQ ID NO: 16426 - protein, 14 aa, Severe acute respiratory syndrome-related coronavirus
  REGION 1..14: note = Table B: HLA-DRB1*04:02L HLA-DRB4*03:01NL HLA-DPA1*03:01-B1*105:01L HLA-DRB1*16:01L
  source 1..14: note = Severe acute respiratory syndrome coronavirus 2
LQAGNATEVPANST

SEQ ID NO: 16427 - protein, 13 aa, Severe acute respiratory syndrome-related coronavirus
  REGION 1..13: note = Table B: HLA-DRB1*04:02L HLA-DQA1*01:02-B1*06:02L
  source 1..13: note = Severe acute respiratory syndrome coronavirus 2
AGNATEVPANSTV

SEQ ID NO: 16428 - protein, 19 aa, Severe acute respiratory syndrome-related coronavirus
  REGION 1..19: note = Table B: HLA-DRB1*04:02L HLA-DRB1*01:01L HLA-DRB1*11:02L HLA-DRB4*01:01L HLA-DRB1*09:01L HLA-DRB1*07:01L
  source 1..19: note = Severe acute respiratory syndrome coronavirus 2
VPANSTVLSFCAFAVDAAK

SEQ ID NO: 16429 - protein, 12 aa, Severe acute respiratory syndrome-related coronavirus
  REGION 1..12: note = Table B: HLA-DRB1*04:02L HLA-DRB1*04:05L HLA-DRB4*03:01NL HLA-DQA1*01-B1*05L HLA-DQA1*05:01-B1*02:01L HLA-DRB1*04:10L
  source 1..12: note = Severe acute respiratory syndrome coronavirus 2
TVTPEANMDQES

SEQ ID NO: 16430 - protein, 13 aa, Severe acute respiratory syndrome-related coronavirus
  REGION 1..13: note = Table B: HLA-DRB1*04:02L HLA-DRB1*14:17L
  source 1..13: note = Severe acute respiratory syndrome coronavirus 2
TPEANMDQESFGG

SEQ ID NO: 16431 - protein, 12 aa, Severe acute respiratory syndrome-related coronavirus
  REGION 1..12: note = Table B: HLA-DRB1*04:02L HLA-DRB1*04:04L HLA-DRB1*04:05L HLA-DQA1*01:02-B1*06:02L HLA-DRB1*04:10L HLA-DQA1*03:01-B1*03:02L HLA-DRB1*16:01L
  source 1..12: note = Severe acute respiratory syndrome coronavirus 2
YVQIPTTCANDP

SEQ ID NO: 16432 - protein, 11 aa, Severe acute respiratory syndrome-related coronavirus
  REGION 1..11: note = Table B: HLA-DRB1*04:02L HLA-DRB1*08:04L HLA-DRB3*02:01L HLA-DRB3*01:01L HLA-DRB1*14:54L HLA-DRB1*14:17L HLA-DRB1*04:08L
  source 1..11: note = Severe acute respiratory syndrome coronavirus 2
DIYNDKVAGFA

SEQ ID NO: 16433 - protein, 11 aa, Severe acute respiratory syndrome-related coronavirus
  REGION 1..11: note = Table B: HLA-DRB1*04:02L HLA-DRB1*01:01L HLA-DRB4*03:01NL HLA-DRB1*11:04L HLA-DRB1*11:01L HLA-DRB3*01:01L HLA-DQA1*05:05-B1*03:01L
  source 1..11: note = Severe acute respiratory syndrome coronavirus 2
RVYANLGERVR

SEQ ID NO: 16434 - protein, 13 aa, Severe acute respiratory syndrome-related coronavirus
  REGION 1..13: note = Table B: HLA-DRB1*04:02L HLA-DRB1*04:05L HLA-DRB4*03:01NL HLA-DQA1*05:01-B1*02:01L HLA-DRB1*04:10L HLA-DRB1*12:01L
  source 1..13: note = Severe acute respiratory syndrome coronavirus 2
NAGIVGVLTLDNQ

SEQ ID NO: 16435 - protein, 14 aa, Severe acute respiratory syndrome-related coronavirus
  REGION 1..14: note = Table B: HLA-DRB1*04:02L HLA-DRB1*01:02L HLA-DPA1*01:03-B1*03:01L HLA-DRB1*08:01L HLA-DRB1*11:01L HLA-DPA1*01:03-B1*04:02L HLA-DRB1*12:01L
  source 1..14: note = Severe acute respiratory syndrome coronavirus 2
IQTTPGSGVPVVDS

SEQ ID NO: 16436 - protein, 12 aa, Severe acute respiratory syndrome-related coronavirus
  REGION 1..12: note = Table B: HLA-DRB1*04:02L HLA-DRB1*14:01L
  source 1..12: note = Severe acute respiratory syndrome coronavirus 2
ILTLTRALTAES

SEQ ID NO: 16437 - protein, 11 aa, Severe acute respiratory syndrome-related coronavirus
  REGION 1..11: note = Table B: HLA-DRB1*04:02L HLA-DQA1*02:01-B1*03:03L
  source 1..11: note = Severe acute respiratory syndrome coronavirus 2
TLTRALTAESH

SEQ ID NO: 16438 - protein, 13 aa, Severe acute respiratory syndrome-related coronavirus
  REGION 1..13: note = Table B: HLA-DRB1*04:02L HLA-DQA1*01:01-B1*05:01L HLA-DRB1*16:01L HLA-DQA1*01:03-B1*06:01L
  source 1..13: note = Severe acute respiratory syndrome coronavirus 2
TAESHVDTDLTKP

SEQ ID NO: 16439 - protein, 11 aa, Severe acute respiratory syndrome-related coronavirus
  REGION 1..11: note = Table B: HLA-DRB1*04:02L HLA-DQA1*03:01-B1*03:02L HLA-DRB1*14:17L
  source 1..11: note = Severe acute respiratory syndrome coronavirus 2
AADPAMHAASG

SEQ ID NO: 16440 - protein, 11 aa, Severe acute respiratory syndrome-related coronavirus
  REGION 1..11: note = Table B: HLA-DRB1*04:02L HLA-DRB1*04:05L HLA-DQA1*01:02-B1*06:02L HLA-DRB1*01:02L HLA-DRB1*08:04L HLA-DRB3*02:01L HLA-DPA1*03:01-B1*04:02L HLA-DRB1*14:01L HLA-DRB1*11:03L HLA-DRB1*11:04L HLA-DRB1*14:02L HLA-DRB5*01:01L
  REGION 1..11: note = CONT. FROM ABOVE: HLA-DRB1*09:01L HLA-DRB1*12:02L HLA-DPA1*03:01 -B1*105:01L HLA-DRB1*14:54L HLA-DQA1*05:05-B1*03:01L HLA-DRB1*14 :17L HLA-DRB1*07:01L HLA-DQA1*01:03-B1*06:01L HLA-DRB1*04:08L
  source 1..11: note = Severe acute respiratory syndrome coronavirus 2
NLDKSAGFPFN

SEQ ID NO: 16441 - protein, 13 aa, Severe acute respiratory syndrome-related coronavirus
  REGION 1..13: note = Table B: HLA-DRB1*04:02L HLA-DRB1*01:02L HLA-DPA1*01:03-B1*03:01L HLA-DRB1*04:10L HLA-DPA1*02:01-B1*13:01L
  source 1..13: note = Severe acute respiratory syndrome coronavirus 2
KRNVIPTITQMNL

SEQ ID NO: 16442 - protein, 15 aa, Severe acute respiratory syndrome-related coronavirus
  REGION 1..15: note = Table B: HLA-DRB1*04:02L HLA-DRB1*04:04L HLA-DRB1*04:05L HLA-DRB1*01:01L HLA-DRB1*11:04L HLA-DRB3*01:01L HLA-DPA1*03:01-B1*105:01L HLA-DRB1*07:01L HLA-DQA1*02:01-B1*03:03L HLA-DRB1*15:01L
  source 1..15: note = Severe acute respiratory syndrome coronavirus 2
MPNMLRIMASLVLAR

SEQ ID NO: 16443 - protein, 14 aa, Severe acute respiratory syndrome-related coronavirus
  REGION 1..14: note = Table B: HLA-DRB1*04:02L HLA-DRB1*01:02L HLA-DRB1*08:04L HLA-DQA1*05:05-B1*03:19L HLA-DRB1*12:02L HLA-DQA1*05:05-B1*03:01L
  source 1..14: note = Severe acute respiratory syndrome coronavirus 2
QAVTANVNALLSTD

SEQ ID NO: 16444 - protein, 12 aa, Severe acute respiratory syndrome-related coronavirus
  REGION 1..12: note = Table B: HLA-DRB1*04:02L HLA-DRB1*14:17L HLA-DQA1*01:03-B1*06:01L HLA-DQA1*02:01-B1*03:03L
  source 1..12: note = Severe acute respiratory syndrome coronavirus 2
NVNALLSTDGNK

SEQ ID NO: 16445 - protein, 13 aa, Severe acute respiratory syndrome-related coronavirus
  REGION 1..13: note = Table B: HLA-DRB1*04:02L HLA-DRB1*08:04L HLA-DRB1*11:03L
  source 1..13: note = Severe acute respiratory syndrome coronavirus 2
ADKYVRNLQHRLY

SEQ ID NO: 16446 - protein, 13 aa, Severe acute respiratory syndrome-related coronavirus
  REGION 1..13: note = Table B: HLA-DRB1*04:02L HLA-DRB1*08:04L HLA-DRB1*09:01L HLA-DRB3*01:01L HLA-DRB1*14:54L HLA-DRB1*04:08L
  source 1..13: note = Severe acute respiratory syndrome coronavirus 2
NRDVDTDFVNEFY

SEQ ID NO: 16447 - protein, 13 aa, Severe acute respiratory syndrome-related coronavirus
  REGION 1..13: note = Table B: HLA-DRB1*04:02L HLA-DRB1*14:01L
  source 1..13: note = Severe acute respiratory syndrome coronavirus 2
ASQGLVASIKNFK

SEQ ID NO: 16448 - protein, 11 aa, Severe acute respiratory syndrome-related coronavirus
  REGION 1..11: note = Table B: HLA-DRB1*04:02L HLA-DRB1*14:01L HLA-DRB1*14:17L
  source 1..11: note = Severe acute respiratory syndrome coronavirus 2
GLVASIKNFKS

SEQ ID NO: 16449 - protein, 12 aa, Severe acute respiratory syndrome-related coronavirus
  REGION 1..12: note = Table B: HLA-DRB1*04:02L HLA-DRB1*04:08L HLA-DRB1*15:01L
  source 1..12: note = Severe acute respiratory syndrome coronavirus 2
SIKNFKSVLYYQ

SEQ ID NO: 16450 - protein, 12 aa, Severe acute respiratory syndrome-related coronavirus
  REGION 1..12: note = Table B: HLA-DRB1*04:02L HLA-DRB1*01:02L HLA-DRB1*14:17L
  source 1..12: note = Severe acute respiratory syndrome coronavirus 2
SVLYYQNNVFMS

SEQ ID NO: 16451 - protein, 13 aa, Severe acute respiratory syndrome-related coronavirus
  REGION 1..13: note = Table B: HLA-DRB1*04:02L HLA-DRB1*04:05L HLA-DRB1*14:01L HLA-DPA1*02:01-B1*13:01L
  source 1..13: note = Severe acute respiratory syndrome coronavirus 2
HTMLVKQGDDYVY

SEQ ID NO: 16452 - protein, 11 aa, Severe acute respiratory syndrome-related coronavirus
  REGION 1..11: note = Table B: HLA-DRB1*04:02L HLA-DRB1*08:01L
  source 1..11: note = Severe acute respiratory syndrome coronavirus 2
DAYPLTKHPNQ

SEQ ID NO: 16453 - protein, 13 aa, Severe acute respiratory syndrome-related coronavirus
  REGION 1..13: note = Table B: HLA-DRB1*04:02L HLA-DRB1*11:03L HLA-DRB1*12:01L HLA-DPA1*02:01-B1*13:01L HLA-DPA1*01:03-B1*02:01L HLA-DRB1*08:02L
  source 1..13: note = Severe acute respiratory syndrome coronavirus 2
HLYLQYIRKLHDE

SEQ ID NO: 16454 - protein, 12 aa, Severe acute respiratory syndrome-related coronavirus
  REGION 1..12: note = Table B: HLA-DRB1*04:02L HLA-DRB1*04:05L HLA-DQA1*05:01-B1*02:01L HLA-DRB1*04:10L
  source 1..12: note = Severe acute respiratory syndrome coronavirus 2
DMYSVMLTNDNT

SEQ ID NO: 16455 - protein, 12 aa, Severe acute respiratory syndrome-related coronavirus
  REGION 1..12: note = Table B: HLA-DRB1*04:02L HLA-DRB1*04:05L HLA-DRB1*04:10L HLA-DQA1*03:01-B1*03:02L HLA-DRB1*14:54L HLA-DRB1*14:17L HLA-DRB1*04:08L
  source 1..12: note = Severe acute respiratory syndrome coronavirus 2
AGDYILANTCTE

SEQ ID NO: 16456 - protein, 12 aa, Severe acute respiratory syndrome-related coronavirus
  REGION 1..12: note = Table B: HLA-DRB1*04:02L HLA-DRB1*01:02L HLA-DRB1*12:01L
  source 1..12: note = Severe acute respiratory syndrome coronavirus 2
YGIATVREVLSD

SEQ ID NO: 16457 - protein, 13 aa, Severe acute respiratory syndrome-related coronavirus
  REGION 1..13: note = Table B: HLA-DRB1*04:02L HLA-DRB1*04:04L HLA-DRB1*04:10L HLA-DRB1*12:01L HLA-DRB1*15:03L
  source 1..13: note = Severe acute respiratory syndrome coronavirus 2
ATVREVLSDRELH

SEQ ID NO: 16458 - protein, 13 aa, Severe acute respiratory syndrome-related coronavirus
  REGION 1..13: note = Table B: HLA-DRB1*04:02L HLA-DRB1*04:05L
  source 1..13: note = Severe acute respiratory syndrome coronavirus 2
EKGDYGDAVVYRG

SEQ ID NO: 16459 - protein, 13 aa, Severe acute respiratory syndrome-related coronavirus
  REGION 1..13: note = Table B: HLA-DRB1*04:02L HLA-DRB1*14:17L
  source 1..13: note = Severe acute respiratory syndrome coronavirus 2
GDYGDAVVYRGTT

SEQ ID NO: 16460 - protein, 13 aa, Severe acute respiratory syndrome-related coronavirus
  REGION 1..13: note = Table B: HLA-DRB1*04:02L
  source 1..13: note = Severe acute respiratory syndrome coronavirus 2
GTTTYKLNVGDYF

SEQ ID NO: 16461 - protein, 13 aa, Severe acute respiratory syndrome-related coronavirus
  REGION 1..13: note = Table B: HLA-DRB1*04:02L HLA-DRB1*08:04L HLA-DPA1*01:03-B1*04:02L HLA-DRB1*12:02L
  source 1..13: note = Severe acute respiratory syndrome coronavirus 2
DYFVLTSHTVMPL

SEQ ID NO: 16462 - protein, 12 aa, Severe acute respiratory syndrome-related coronavirus
  REGION 1..12: note = Table B: HLA-DRB1*04:02L HLA-DQA1*05:01-B1*02:01L HLA-DRB1*14:17L HLA-DQA1*01:03-B1*06:01L HLA-DQA1*02:01-B1*03:03L
  source 1..12: note = Severe acute respiratory syndrome coronavirus 2
NISDEFSSNVAN

SEQ ID NO: 16463 - protein, 12 aa, Severe acute respiratory syndrome-related coronavirus
  REGION 1..12: note = Table B: HLA-DRB1*04:02L HLA-DRB1*08:04L HLA-DRB3*02:01L HLA-DRB1*08:01L HLA-DRB1*12:02L HLA-DRB1*14:54L HLA-DRB1*14:17L HLA-DRB1*04:08L
  source 1..12: note = Severe acute respiratory syndrome coronavirus 2
LALYYPSARIVY

SEQ ID NO: 16464 - protein, 12 aa, Severe acute respiratory syndrome-related coronavirus
  REGION 1..12: note = Table B: HLA-DRB1*04:02L HLA-DRB1*08:04L HLA-DRB3*02:01L HLA-DRB1*08:01L HLA-DRB1*14:54L HLA-DRB1*14:17L HLA-DRB1*07:01L HLA-DRB1*04:08L
  source 1..12: note = Severe acute respiratory syndrome coronavirus 2
ALYYPSARIVYT

SEQ ID NO: 16465 - protein, 12 aa, Severe acute respiratory syndrome-related coronavirus
  REGION 1..12: note = Table B: HLA-DRB1*04:02L HLA-DRB1*04:04L HLA-DRB1*04:05L HLA-DRB1*08:04L HLA-DRB3*02:01L HLA-DRB1*11:03L HLA-DRB1*11:04L HLA-DRB1*09:01L HLA-DRB1*07:01L HLA-DRB1*04:08L
  source 1..12: note = Severe acute respiratory syndrome coronavirus 2
FKVNSTLEQYVF

SEQ ID NO: 16466 - protein, 12 aa, Severe acute respiratory syndrome-related coronavirus
  REGION 1..12: note = Table B: HLA-DRB1*04:02L HLA-DRB1*01:02L HLA-DPA1*03:01-B1*04:02L HLA-DRB1*14:01L HLA-DPA1*03:01-B1*105:01L
  source 1..12: note = Severe acute respiratory syndrome coronavirus 2
ADIVVFDEISMA

SEQ ID NO: 16467 - protein, 12 aa, Severe acute respiratory syndrome-related coronavirus
  REGION 1..12: note = Table B: HLA-DRB1*04:02L HLA-DRB1*01:02L HLA-DRB1*14:01L HLA-DPA1*03:01-B1*105:01L
  source 1..12: note = Severe acute respiratory syndrome coronavirus 2
DIVVFDEISMAT

SEQ ID NO: 16468 - protein, 11 aa, Severe acute respiratory syndrome-related coronavirus
  REGION 1..11: note = Table B: HLA-DRB1*04:02L HLA-DRB1*01:01L HLA-DRB4*03:01NL HLA-DRB1*11:04L HLA-DRB5*01:01L HLA-DRB1*12:02L HLA-DRB3*01:01L HLA-DQA1*05:05-B1*03:01L HLA-DRB1*16:01L
  source 1..11: note = Severe acute respiratory syndrome coronavirus 2
AINRPQIGVVR

SEQ ID NO: 16469 - protein, 11 aa, Severe acute respiratory syndrome-related coronavirus
  REGION 1..11: note = Table B: HLA-DRB1*04:02L HLA-DQA1*05:01-B1*02:01L HLA-DQA1*02:01-B1*03:03L
  source 1..11: note = Severe acute respiratory syndrome coronavirus 2
AVFISPYNSQN

SEQ ID NO: 16470 - protein, 11 aa, Severe acute respiratory syndrome-related coronavirus
  REGION 1..11: note = Table B: HLA-DRB1*04:02L
  source 1..11: note = Severe acute respiratory syndrome coronavirus 2
VFISPYNSQNA

SEQ ID NO: 16471 - protein, 14 aa, Severe acute respiratory syndrome-related coronavirus
  REGION 1..14: note = Table B: HLA-DRB1*04:02L HLA-DRB1*04:05L HLA-DRB1*01:02L HLA-DRB1*04:10L HLA-DRB1*12:01L HLA-DPA1*02:01-B1*13:01L HLA-DQA1*03:01-B1*03:02L HLA-DRB1*16:01L HLA-DRB1*04:08L
  source 1..14: note = Severe acute respiratory syndrome coronavirus 2
VGILCIMSDRDLYD

SEQ ID NO: 16472 - protein, 12 aa, Severe acute respiratory syndrome-related coronavirus
  REGION 1..12: note = Table B: HLA-DRB1*04:02L HLA-DRB1*01:02L HLA-DRB3*02:01L HLA-DRB1*15:01L
  source 1..12: note = Severe acute respiratory syndrome coronavirus 2
YQVNGYPNMFIT

SEQ ID NO: 16473 - protein, 14 aa, Severe acute respiratory syndrome-related coronavirus
  REGION 1..14: note = Table B: HLA-DRB1*04:02L HLA-DQA1*05:05-B1*03:01L
  source 1..14: note = Severe acute respiratory syndrome coronavirus 2
STGVNLVAVPTGYV

SEQ ID NO: 16474 - protein, 12 aa, Severe acute respiratory syndrome-related coronavirus
  REGION 1..12: note = Table B: HLA-DRB1*04:02L HLA-DQA1*03:01-B1*03:02L HLA-DRB1*16:01L HLA-DQA1*02:01-B1*03:03L
  source 1..12: note = Severe acute respiratory syndrome coronavirus 2
TDFSRVSAKPPP

SEQ ID NO: 16475 - protein, 18 aa, Severe acute respiratory syndrome-related coronavirus
  REGION 1..18: note = Table B: HLA-DRB1*04:02L HLA-DRB1*08:77L HLA-DRB1*11:02L HLA-DQA1*01-B1*05L HLA-DRB1*09:01L HLA-DPA1*01:03-B1*02:01L HLA-DRB1*14:17L HLA-DRB1*08:02L HLA-DRB1*08:03L HLA-DRB1*15:01L
  source 1..18: note = Severe acute respiratory syndrome coronavirus 2
KPPPGDQFKHLIPLMYKG

SEQ ID NO: 16476 - protein, 12 aa, Severe acute respiratory syndrome-related coronavirus
  REGION 1..12: note = Table B: HLA-DRB1*04:02L HLA-DRB1*01:02L HLA-DRB1*14:01L HLA-DQA1*05:01-B1*02:01L HLA-DRB1*12:01L HLA-DRB1*16:01L
  source 1..12: note = Severe acute respiratory syndrome coronavirus 2
DTLKNLSDRVVF

SEQ ID NO: 16477 - protein, 12 aa, Severe acute respiratory syndrome-related coronavirus
  REGION 1..12: note = Table B: HLA-DRB1*04:02L HLA-DQA1*01:02-B1*06:02L HLA-DRB1*14:01L HLA-DRB1*08:01L HLA-DQA1*03:01-B1*03:02L HLA-DRB1*16:01L HLA-DRB1*04:08L HLA-DQA1*02:01-B1*03:03L
  source 1..12: note = Severe acute respiratory syndrome coronavirus 2
TSMKYFVKIGPE

SEQ ID NO: 16478 - protein, 13 aa, Severe acute respiratory syndrome-related coronavirus
  REGION 1..13: note = Table B: HLA-DRB1*04:02L HLA-DPA1*03:01-B1*04:02L HLA-DRB1*11:01L HLA-DRB1*12:01L HLA-DRB1*15:03L
  source 1..13: note = Severe acute respiratory syndrome coronavirus 2
ASDTYACWHHSIG

SEQ ID NO: 16479 - protein, 15 aa, Severe acute respiratory syndrome-related coronavirus
  REGION 1..15: note = Table B: HLA-DRB1*04:02L HLA-DPA1*01:03-B1*04:02L HLA-DPA1*01:03-B1*104:01L HLA-DRB1*15:03L
  source 1..15: note = Severe acute respiratory syndrome coronavirus 2
DIGNPKAIKCVPQAD

SEQ ID NO: 16480 - protein, 12 aa, Severe acute respiratory syndrome-related coronavirus
  REGION 1..12: note = Table B: HLA-DRB1*04:02L HLA-DRB3*02:01L HLA-DRB1*14:17L
  source 1..12: note = Severe acute respiratory syndrome coronavirus 2
TRLQSLENVAFN

SEQ ID NO: 16481 - protein, 10 aa, Severe acute respiratory syndrome-related coronavirus
  REGION 1..10: note = Table B: HLA-DRB1*04:02L HLA-DQA1*03:01-B1*03:02L HLA-DQA1*02:01-B1*03:03L
  source 1..10: note = Severe acute respiratory syndrome coronavirus 2
NVVNKGHFDG

SEQ ID NO: 16482 - protein, 14 aa, Severe acute respiratory syndrome-related coronavirus
  REGION 1..14: note = Table B: HLA-DRB1*04:02L HLA-DRB1*04:05L HLA-DRB1*01:02L HLA-DRB1*08:01L HLA-DRB1*11:01L HLA-DPA1*01:03-B1*04:02L
  source 1..14: note = Severe acute respiratory syndrome coronavirus 2
FDGQQGEVPVSIIN

SEQ ID NO: 16483 - protein, 17 aa, Severe acute respiratory syndrome-related coronavirus
  REGION 1..17: note = Table B: HLA-DRB1*04:02L HLA-DRB1*14:02L HLA-DPA1*01:03-B1*02:01L HLA-DRB1*08:02L HLA-DRB1*08:03L
  source 1..17: note = Severe acute respiratory syndrome coronavirus 2
LPVNVAFELWAKRNIKP

SEQ ID NO: 16484 - protein, 16 aa, Severe acute respiratory syndrome-related coronavirus
  REGION 1..16: note = Table B: HLA-DRB1*04:02L HLA-DRB1*11:02L HLA-DRB1*14:02L HLA-DRB1*08:02L
  source 1..16: note = Severe acute respiratory syndrome coronavirus 2
NVAFELWAKRNIKPVP

SEQ ID NO: 16485 - protein, 13 aa, Severe acute respiratory syndrome-related coronavirus
  REGION 1..13: note = Table B: HLA-DRB1*04:02L
  source 1..13: note = Severe acute respiratory syndrome coronavirus 2
ELWAKRNIKPVPE

SEQ ID NO: 16486 - protein, 14 aa, Severe acute respiratory syndrome-related coronavirus
  REGION 1..14: note = Table B: HLA-DRB1*04:02L HLA-DRB1*04:04L HLA-DRB3*01:01L HLA-DRB1*15:01L
  source 1..14: note = Severe acute respiratory syndrome coronavirus 2
KRNIKPVPEVKILN

SEQ ID NO: 16487 - protein, 12 aa, Severe acute respiratory syndrome-related coronavirus
  REGION 1..12: note = Table B: HLA-DRB1*04:02L HLA-DRB1*04:05L HLA-DRB4*03:01NL HLA-DQA1*01-B1*05L HLA-DQA1*05:01-B1*02:01L HLA-DRB1*04:10L HLA-DQA1*03:01-B1*03:02L HLA-DRB1*14:54L HLA-DRB1*16:01L HLA-DQA1*02:01-B1*03:03L
  source 1..12: note = Severe acute respiratory syndrome coronavirus 2
LNNLGVDIAANT

SEQ ID NO: 16488 - protein, 11 aa, Severe acute respiratory syndrome-related coronavirus
  REGION 1..11: note = Table B: HLA-DRB1*04:02L HLA-DQA1*05:05-B1*03:01L HLA-DRB1*14:17L
  source 1..11: note = Severe acute respiratory syndrome coronavirus 2
LIGEAVKTQFN

SEQ ID NO: 16489 - protein, 11 aa, Severe acute respiratory syndrome-related coronavirus
  REGION 1..11: note = Table B: HLA-DRB1*04:02L HLA-DRB1*04:05L
  source 1..11: note = Severe acute respiratory syndrome coronavirus 2
NYYKKVDGVVQ

SEQ ID NO: 16490 - protein, 13 aa, Severe acute respiratory syndrome-related coronavirus
  REGION 1..13: note = Table B: HLA-DRB1*04:02L HLA-DRB1*04:05L HLA-DRB1*01:02L HLA-DRB1*08:01L HLA-DRB1*12:01L
  source 1..13: note = Severe acute respiratory syndrome coronavirus 2
FTQSRNLQEFKPR

SEQ ID NO: 16491 - protein, 13 aa, Severe acute respiratory syndrome-related coronavirus
  REGION 1..13: note = Table B: HLA-DRB1*04:02L HLA-DRB1*04:05L HLA-DRB3*01:01L
  source 1..13: note = Severe acute respiratory syndrome coronavirus 2
SPFELEDFIPMDS

SEQ ID NO: 16492 - protein, 12 aa, Severe acute respiratory syndrome-related coronavirus
  REGION 1..12: note = Table B: HLA-DRB1*04:02L HLA-DRB1*14:17L HLA-DRB1*16:01L
  source 1..12: note = Severe acute respiratory syndrome coronavirus 2
KNYFITDAQTGS

SEQ ID NO: 16493 - protein, 11 aa, Severe acute respiratory syndrome-related coronavirus
  REGION 1..11: note = Table B: HLA-DRB1*04:02L HLA-DRB1*04:05L HLA-DRB4*03:01NL HLA-DQA1*01-B1*05L HLA-DQA1*03:01-B1*03:02L HLA-DRB1*14:54L HLA-DRB1*16:01L
  source 1..11: note = Severe acute respiratory syndrome coronavirus 2
YFITDAQTGSS

SEQ ID NO: 16494 - protein, 11 aa, Severe acute respiratory syndrome-related coronavirus
  REGION 1..11: note = Table B: HLA-DRB1*04:02L HLA-DQA1*05:01-B1*02:01L HLA-DRB1*14:17L HLA-DRB1*16:01L HLA-DQA1*02:01-B1*03:03L
  source 1..11: note = Severe acute respiratory syndrome coronavirus 2
GSDKGVAPGTA

SEQ ID NO: 16495 - protein, 14 aa, Severe acute respiratory syndrome-related coronavirus
  REGION 1..14: note = Table B: HLA-DRB1*04:02L HLA-DRB1*04:05L HLA-DRB1*04:10L HLA-DRB1*12:01L
  source 1..14: note = Severe acute respiratory syndrome coronavirus 2
LPTGTLLVDSDLND

SEQ ID NO: 16496 - protein, 13 aa, Severe acute respiratory syndrome-related coronavirus
  REGION 1..13: note = Table B: HLA-DRB1*04:02L HLA-DQA1*05:01-B1*02:01L HLA-DRB1*14:54L HLA-DRB1*14:17L HLA-DRB1*16:01L
  source 1..13: note = Severe acute respiratory syndrome coronavirus 2
DSTLIGDCATVHT

SEQ ID NO: 16497 - protein, 13 aa, Severe acute respiratory syndrome-related coronavirus
  REGION 1..13: note = Table B: HLA-DRB1*04:02L
  source 1..13: note = Severe acute respiratory syndrome coronavirus 2
STLIGDCATVHTA

SEQ ID NO: 16498 - protein, 12 aa, Severe acute respiratory syndrome-related coronavirus
  REGION 1..12: note = Table B: HLA-DRB1*04:02L HLA-DRB1*08:04L HLA-DRB1*04:08L
  source 1..12: note = Severe acute respiratory syndrome coronavirus 2
DMYDPKTKNVTK

SEQ ID NO: 16499 - protein, 11 aa, Severe acute respiratory syndrome-related coronavirus
  REGION 1..11: note = Table B: HLA-DRB1*04:02L HLA-DRB1*04:05L HLA-DRB1*14:17L HLA-DQA1*02:01-B1*03:03L
  source 1..11: note = Severe acute respiratory syndrome coronavirus 2
NVTKENDSKEG

SEQ ID NO: 16500 - protein, 12 aa, Severe acute respiratory syndrome-related coronavirus
  REGION 1..12: note = Table B: HLA-DRB1*04:02L HLA-DRB1*04:05L HLA-DRB1*01:02L HLA-DQA1*01:01-B1*05:01L HLA-DPA1*02:01-B1*13:01L HLA-DPA1*03:01-B1*105:01L HLA-DQA1*01:03-B1*06:01L HLA-DRB1*04:08L
  source 1..12: note = Severe acute respiratory syndrome coronavirus 2
ITEHSWNADLYK

SEQ ID NO: 16501 - protein, 17 aa, Severe acute respiratory syndrome-related coronavirus
  REGION 1..17: note = Table B: HLA-DRB1*04:02L HLA-DRB1*14:02L HLA-DQA1*01:01-B1*05:01L HLA-DPA1*01:03-B1*04:01L HLA-DRB3*01:01L
  source 1..17: note = Severe acute respiratory syndrome coronavirus 2
FPLKLRGTAVMSLKEGQ

SEQ ID NO: 16502 - protein, 15 aa, Severe acute respiratory syndrome-related coronavirus
  REGION 1..15: note = Table B: HLA-DRB1*04:02L HLA-DRB1*04:04L HLA-DRB1*04:05L
  source 1..15: note = Severe acute respiratory syndrome coronavirus 2
EGQINDMILSLLSKG

SEQ ID NO: 16503 - protein, 11 aa, Severe acute respiratory syndrome-related coronavirus
  REGION 1..11: note = Table B: HLA-DRB1*04:02L HLA-DRB1*14:01L HLA-DQA1*05:01-B1*02:01L HLA-DRB1*12:01L HLA-DQA1*03:01-B1*03:02L HLA-DRB1*14:54L HLA-DRB1*16:01L
  source 1..11: note = Severe acute respiratory syndrome coronavirus 2
RVVISSDVLVN

SEQ ID NO: 16504 - protein, 12 aa, Severe acute respiratory syndrome-related coronavirus
  REGION 1..12: note = Table B: HLA-DRB1*04:02L HLA-DQA1*03:01-B1*03:02L
  source 1..12: note = Severe acute respiratory syndrome coronavirus 2
FHAIHVSGTNGT

SEQ ID NO: 16505 - protein, 13 aa, Severe acute respiratory syndrome-related coronavirus
  REGION 1..13: note = Table B: HLA-DRB1*04:02L HLA-DRB1*01:01L
  source 1..13: note = Severe acute respiratory syndrome coronavirus 2
DPFLGVYYHKNNK

SEQ ID NO: 16506 - protein, 14 aa, Severe acute respiratory syndrome-related coronavirus
  REGION 1..14: note = Table B: HLA-DRB1*04:02L HLA-DRB1*04:04L HLA-DRB1*11:02L HLA-DQA1*03:01-B1*03:02L HLA-DRB1*07:01L HLA-DRB1*08:02L HLA-DRB1*08:03L
  source 1..14: note = Severe acute respiratory syndrome coronavirus 2
LGVYYHKNNKSWME

SEQ ID NO: 16507 - protein, 13 aa, Severe acute respiratory syndrome-related coronavirus
  REGION 1..13: note = Table B: HLA-DRB1*04:02L HLA-DRB1*11:04L HLA-DRB1*08:03L
  source 1..13: note = Severe acute respiratory syndrome coronavirus 2
DGYFKIYSKHTPI

SEQ ID NO: 16508 - protein, 11 aa, Severe acute respiratory syndrome-related coronavirus
  REGION 1..11: note = Table B: HLA-DRB1*04:02L HLA-DRB1*14:17L
  source 1..11: note = Severe acute respiratory syndrome coronavirus 2
VDLPIGINITR

SEQ ID NO: 16509 - protein, 14 aa, Severe acute respiratory syndrome-related coronavirus
  REGION 1..14: note = Table B: HLA-DRB1*04:02L HLA-DRB1*04:05L HLA-DRB1*08:01L HLA-DRB1*11:01L
  source 1..14: note = Severe acute respiratory syndrome coronavirus 2
SSGWTAGAAAYYVG

SEQ ID NO: 16510 - protein, 15 aa, Severe acute respiratory syndrome-related coronavirus
  REGION 1..15: note = Table B: HLA-DRB1*04:02L HLA-DRB1*11:04L HLA-DRB1*11:01L HLA-DRB1*12:01L HLA-DPA1*02:01-B1*13:01L
  source 1..15: note = Severe acute respiratory syndrome coronavirus 2
QPRTFLLKYNENGTI

SEQ ID NO: 16511 - protein, 13 aa, Severe acute respiratory syndrome-related coronavirus
  REGION 1..13: note = Table B: HLA-DRB1*04:02L HLA-DRB1*04:05L HLA-DQA1*01:02-B1*06:02L HLA-DRB1*04:10L HLA-DQA1*03:01-B1*03:02L
  source 1..13: note = Severe acute respiratory syndrome coronavirus 2
TDAVDCALDPLSE

SEQ ID NO: 16512 - protein, 14 aa, Severe acute respiratory syndrome-related coronavirus
  REGION 1..14: note = Table B: HLA-DRB1*04:02L HLA-DRB1*11:03L HLA-DRB1*15:03L
  source 1..14: note = Severe acute respiratory syndrome coronavirus 2
VGGNYNYLYRLFRK

SEQ ID NO: 16513 - protein, 14 aa, Severe acute respiratory syndrome-related coronavirus
  REGION 1..14: note = Table B: HLA-DRB1*04:02L
  source 1..14: note = Severe acute respiratory syndrome coronavirus 2
GGNYNYLYRLFRKS

SEQ ID NO: 16514 - protein, 12 aa, Severe acute respiratory syndrome-related coronavirus
  REGION 1..12: note = Table B: HLA-DRB1*04:02L HLA-DRB1*08:01L
  source 1..12: note = Severe acute respiratory syndrome coronavirus 2
NLKPFERDISTE

SEQ ID NO: 16515 - protein, 13 aa, Severe acute respiratory syndrome-related coronavirus
  REGION 1..13: note = Table B: HLA-DRB1*04:02L HLA-DRB1*04:05L HLA-DRB4*03:01NL HLA-DRB1*11:03L HLA-DRB1*11:04L HLA-DRB1*08:01L HLA-DRB1*11:01L HLA-DRB1*09:01L
  source 1..13: note = Severe acute respiratory syndrome coronavirus 2
LKPFERDISTEIY

SEQ ID NO: 16516 - protein, 12 aa, Severe acute respiratory syndrome-related coronavirus
  REGION 1..12: note = Table B: HLA-DRB1*04:02L HLA-DQA1*01:01-B1*05:01L HLA-DRB1*16:01L
  source 1..12: note = Severe acute respiratory syndrome coronavirus 2
QPTNGVGYQPYR

SEQ ID NO: 16517 - protein, 14 aa, Severe acute respiratory syndrome-related coronavirus
  REGION 1..14: note = Table B: HLA-DRB1*04:02L HLA-DRB1*04:05L HLA-DRB1*01:02L HLA-DRB1*11:03L HLA-DRB1*11:04L HLA-DRB1*08:01L HLA-DRB1*11:01L HLA-DRB3*01:01L HLA-DRB1*04:08L
  source 1..14: note = Severe acute respiratory syndrome coronavirus 2
TGVLTESNKKFLPF

SEQ ID NO: 16518 - protein, 14 aa, Severe acute respiratory syndrome-related coronavirus
  REGION 1..14: note = Table B: HLA-DRB1*04:02L HLA-DRB1*04:05L HLA-DRB1*11:02L HLA-DRB1*11:03L HLA-DRB1*11:04L HLA-DRB1*11:01L HLA-DRB3*01:01L HLA-DRB1*14:54L HLA-DRB1*04:08L
  source 1..14: note = Severe acute respiratory syndrome coronavirus 2
GVLTESNKKFLPFQ

SEQ ID NO: 16519 - protein, 14 aa, Severe acute respiratory syndrome-related coronavirus
  REGION 1..14: note = Table B: HLA-DRB1*04:02L HLA-DRB1*04:05L HLA-DQA1*01:02-B1*06:02L HLA-DRB1*16:01L
  source 1..14: note = Severe acute respiratory syndrome coronavirus 2
FQQFGRDIADTTDA

SEQ ID NO: 16520 - protein, 11 aa, Severe acute respiratory syndrome-related coronavirus
  REGION 1..11: note = Table B: HLA-DRB1*04:02L HLA-DQA1*03:01-B1*03:02L
  source 1..11: note = Severe acute respiratory syndrome coronavirus 2
VITPGTNTSNQ

SEQ ID NO: 16521 - protein, 14 aa, Severe acute respiratory syndrome-related coronavirus
  REGION 1..14: note = Table B: HLA-DRB1*04:02L HLA-DRB1*01:02L
  source 1..14: note = Severe acute respiratory syndrome coronavirus 2
NQVAVLYQDVNCTE

SEQ ID NO: 16522 - protein, 13 aa, Severe acute respiratory syndrome-related coronavirus
  REGION 1..13: note = Table B: HLA-DRB1*04:02L
  source 1..13: note = Severe acute respiratory syndrome coronavirus 2
EVPVAIHADQLTP

SEQ ID NO: 16523 - protein, 11 aa, Severe acute respiratory syndrome-related coronavirus
  REGION 1..11: note = Table B: HLA-DRB1*04:02L HLA-DQA1*05:05-B1*03:01L HLA-DRB1*14:17L
  source 1..11: note = Severe acute respiratory syndrome coronavirus 2
IHADQLTPTWR

SEQ ID NO: 16524 - protein, 12 aa, Severe acute respiratory syndrome-related coronavirus
  REGION 1..12: note = Table B: HLA-DRB1*04:02L HLA-DRB1*08:04L HLA-DRB1*08:01L HLA-DRB1*14:54L
  source 1..12: note = Severe acute respiratory syndrome coronavirus 2
DQLTPTWRVYST

SEQ ID NO: 16525 - protein, 13 aa, Severe acute respiratory syndrome-related coronavirus
  REGION 1..13: note = Table B: HLA-DRB1*04:02L HLA-DRB1*04:05L
  source 1..13: note = Severe acute respiratory syndrome coronavirus 2
ARSVASQSIIAYT

SEQ ID NO: 16526 - protein, 12 aa, Severe acute respiratory syndrome-related coronavirus
  REGION 1..12: note = Table B: HLA-DRB1*04:02L HLA-DQA1*01:02-B1*06:02L HLA-DRB1*12:01L HLA-DRB1*15:03L
  source 1..12: note = Severe acute respiratory syndrome coronavirus 2
SIIAYTMSLGAE

SEQ ID NO: 16527 - protein, 14 aa, Severe acute respiratory syndrome-related coronavirus
  REGION 1..14: note = Table B: HLA-DRB1*04:02L HLA-DRB1*14:17L
  source 1..14: note = Severe acute respiratory syndrome coronavirus 2
TMSLGAENSVAYSN

SEQ ID NO: 16528 - protein, 14 aa, Severe acute respiratory syndrome-related coronavirus
  REGION 1..14: note = Table B: HLA-DRB1*04:02L
  source 1..14: note = Severe acute respiratory syndrome coronavirus 2
MSLGAENSVAYSNN

SEQ ID NO: 16529 - protein, 11 aa, Severe acute respiratory syndrome-related coronavirus
  REGION 1..11: note = Table B: HLA-DRB1*04:02L
  source 1..11: note = Severe acute respiratory syndrome coronavirus 2
TEILPVSMTKT

SEQ ID NO: 16530 - protein, 11 aa, Severe acute respiratory syndrome-related coronavirus
  REGION 1..11: note = Table B: HLA-DRB1*04:02L HLA-DRB1*14:17L
  source 1..11: note = Severe acute respiratory syndrome coronavirus 2
EVFAQVKQIYK

SEQ ID NO: 16531 - protein, 12 aa, Severe acute respiratory syndrome-related coronavirus
  REGION 1..12: note = Table B: HLA-DRB1*04:02L HLA-DQA1*01:02-B1*06:02L HLA-DRB1*01:02L HLA-DRB1*12:01L HLA-DRB1*16:01L HLA-DQA1*02:01-B1*03:03L HLA-DRB1*15:03L
  source 1..12: note = Severe acute respiratory syndrome coronavirus 2
FAQVKQIYKTPP

SEQ ID NO: 16532 - protein, 11 aa, Severe acute respiratory syndrome-related coronavirus
  REGION 1..11: note = Table B: HLA-DRB1*04:02L HLA-DQA1*03:01-B1*03:02L
  source 1..11: note = Severe acute respiratory syndrome coronavirus 2
VKQIYKTPPIK

SEQ ID NO: 16533 - protein, 11 aa, Severe acute respiratory syndrome-related coronavirus
  REGION 1..11: note = Table B: HLA-DRB1*04:02L HLA-DQA1*03:01-B1*03:02L HLA-DRB1*14:17L
  source 1..11: note = Severe acute respiratory syndrome coronavirus 2
IYKTPPIKDFG

SEQ ID NO: 16534 - protein, 11 aa, Severe acute respiratory syndrome-related coronavirus
  REGION 1..11: note = Table B: HLA-DRB1*04:02L HLA-DQA1*05:01-B1*02:01L HLA-DRB1*14:17L
  source 1..11: note = Severe acute respiratory syndrome coronavirus 2
FSQILPDPSKP

SEQ ID NO: 16535 - protein, 14 aa, Severe acute respiratory syndrome-related coronavirus
  REGION 1..14: note = Table B: HLA-DRB1*04:02L HLA-DRB1*04:04L HLA-DRB1*04:05L HLA-DPA1*03:01-B1*04:02L HLA-DRB1*14:01L HLA-DRB1*15:01L
  source 1..14: note = Severe acute respiratory syndrome coronavirus 2
AGFIKQYGDCLGDI

SEQ ID NO: 16536 - protein, 12 aa, Severe acute respiratory syndrome-related coronavirus
  REGION 1..12: note = Table B: HLA-DRB1*04:02L HLA-DRB1*12:01L HLA-DRB1*14:17L HLA-DRB1*16:01L
  source 1..12: note = Severe acute respiratory syndrome coronavirus 2
DEMIAQYTSALL

SEQ ID NO: 16537 - protein, 13 aa, Severe acute respiratory syndrome-related coronavirus
  REGION 1..13: note = Table B: HLA-DRB1*04:02L HLA-DQA1*05:05-B1*03:116L HLA-DRB1*12:01L HLA-DPA1*01:03-B1*104:01L HLA-DRB1*16:01L HLA-DRB1*15:03L
  source 1..13: note = Severe acute respiratory syndrome coronavirus 2
TFGAGAALQIPFA

SEQ ID NO: 16538 - protein, 13 aa, Severe acute respiratory syndrome-related coronavirus
  REGION 1..13: note = Table B: HLA-DRB1*04:02L HLA-DRB1*04:10L
  source 1..13: note = Severe acute respiratory syndrome coronavirus 2
FNGIGVTQNVLYE

SEQ ID NO: 16539 - protein, 13 aa, Severe acute respiratory syndrome-related coronavirus
  REGION 1..13: note = Table B: HLA-DRB1*04:02L HLA-DRB1*01:02L
  source 1..13: note = Severe acute respiratory syndrome coronavirus 2
NGIGVTQNVLYEN

SEQ ID NO: 16540 - protein, 12 aa, Severe acute respiratory syndrome-related coronavirus
  REGION 1..12: note = Table B: HLA-DRB1*04:02L HLA-DRB1*01:02L HLA-DQA1*05:05-B1*03:01L
  source 1..12: note = Severe acute respiratory syndrome coronavirus 2
YENQKLIANQFN

SEQ ID NO: 16541 - protein, 13 aa, Severe acute respiratory syndrome-related coronavirus
  REGION 1..13: note = Table B: HLA-DRB1*04:02L HLA-DRB1*04:04L HLA-DRB1*04:05L HLA-DRB4*03:01NL HLA-DRB1*04:10L HLA-DQA1*03:01-B1*03:02L HLA-DRB1*14:54L HLA-DRB1*16:01L
  source 1..13: note = Severe acute respiratory syndrome coronavirus 2
GKIQDSLSSTASA

SEQ ID NO: 16542 - protein, 11 aa, Severe acute respiratory syndrome-related coronavirus
  REGION 1..11: note = Table B: HLA-DRB1*04:02L HLA-DRB1*04:05L HLA-DQA1*01:01-B1*05:01L HLA-DRB1*04:10L HLA-DPA1*03:01-B1*105:01L HLA-DRB1*14:17L HLA-DRB1*16:01L
  source 1..11: note = Severe acute respiratory syndrome coronavirus 2
SALGKLQDVVN

SEQ ID NO: 16543 - protein, 11 aa, Severe acute respiratory syndrome-related coronavirus
  REGION 1..11: note = Table B: HLA-DRB1*04:02L HLA-DQA1*01-B1*05L HLA-DRB1*14:17L
  source 1..11: note = Severe acute respiratory syndrome coronavirus 2
LGKLQDVVNQN

SEQ ID NO: 16544 - protein, 12 aa, Severe acute respiratory syndrome-related coronavirus
  REGION 1..12: note = Table B: HLA-DRB1*04:02L HLA-DRB1*04:05L HLA-DRB1*01:02L HLA-DRB4*03:01NL HLA-DPA1*01:03-B1*03:01L HLA-DRB1*04:10L HLA-DRB1*12:01L HLA-DPA1*03:01-B1*105:01L HLA-DRB1*14:54L HLA-DRB1*16:01L HLA-DRB1*04:08L
  source 1..12: note = Severe acute respiratory syndrome coronavirus 2
SSNFGAISSVLN

SEQ ID NO: 16545 - protein, 12 aa, Severe acute respiratory syndrome-related coronavirus
  REGION 1..12: note = Table B: HLA-DRB1*04:02L HLA-DRB1*04:05L HLA-DRB1*01:02L HLA-DRB4*03:01NL HLA-DRB1*04:10L HLA-DRB1*12:01L HLA-DPA1*03:01-B1*105:01L HLA-DRB1*14:54L HLA-DRB1*10:01L HLA-DRB1*16:01L HLA-DRB1*04:08L
  source 1..12: note = Severe acute respiratory syndrome coronavirus 2
SNFGAISSVLND

SEQ ID NO: 16546 - protein, 12 aa, Severe acute respiratory syndrome-related coronavirus
  REGION 1..12: note = Table B: HLA-DRB1*04:02L HLA-DRB1*14:17L
  source 1..12: note = Severe acute respiratory syndrome coronavirus 2
GAISSVLNDILS

SEQ ID NO: 16547 - protein, 12 aa, Severe acute respiratory syndrome-related coronavirus
  REGION 1..12: note = Table B: HLA-DRB1*04:02L HLA-DRB1*04:05L HLA-DQA1*01:02-B1*06:02L HLA-DRB1*14:01L HLA-DRB1*08:01L HLA-DRB1*16:01L
  source 1..12: note = Severe acute respiratory syndrome coronavirus 2
LSRLDKVEAEVQ

SEQ ID NO: 16548 - protein, 12 aa, Severe acute respiratory syndrome-related coronavirus
  REGION 1..12: note = Table B: HLA-DRB1*04:02L HLA-DRB1*04:05L HLA-DRB1*04:10L HLA-DRB1*12:01L HLA-DRB1*14:54L
  source 1..12: note = Severe acute respiratory syndrome coronavirus 2
TGRLQSLQTYVT

SEQ ID NO: 16549 - protein, 13 aa, Severe acute respiratory syndrome-related coronavirus
  REGION 1..13: note = Table B: HLA-DRB1*04:02L HLA-DRB1*04:05L HLA-DRB1*08:04L HLA-DRB1*08:01L HLA-DQA1*05:05-B1*03:19L HLA-DPA1*01:03-B1*02:01L HLA-DQA1*05:05-B1*03:01L
  source 1..13: note = Severe acute respiratory syndrome coronavirus 2
VVFLHVTYVPAQE

SEQ ID NO: 16550 - protein, 12 aa, Severe acute respiratory syndrome-related coronavirus
  REGION 1..12: note = Table B: HLA-DRB1*04:02L HLA-DRB1*08:04L HLA-DRB1*11:04L HLA-DRB1*08:01L HLA-DRB1*04:10L HLA-DRB1*12:02L HLA-DRB3*01:01L HLA-DRB1*14:54L HLA-DRB1*14:17L HLA-DRB1*04:08L HLA-DRB1*08:03L
  source 1..12: note = Severe acute respiratory syndrome coronavirus 2
EGVFVSNGTHWF

SEQ ID NO: 16551 - protein, 13 aa, Severe acute respiratory syndrome-related coronavirus
  REGION 1..13: note = Table B: HLA-DRB1*04:02L HLA-DRB1*08:04L HLA-DRB1*12:02L HLA-DRB3*01:01L HLA-DRB1*14:54L
  source 1..13: note = Severe acute respiratory syndrome coronavirus 2
GVFVSNGTHWFVT

SEQ ID NO: 16552 - protein, 12 aa, Severe acute respiratory syndrome-related coronavirus
  REGION 1..12: note = Table B: HLA-DRB1*04:02L
  source 1..12: note = Severe acute respiratory syndrome coronavirus 2
FYEPQIITTDNT

SEQ ID NO: 16553 - protein, 11 aa, Severe acute respiratory syndrome-related coronavirus
  REGION 1..11: note = Table B: HLA-DRB1*04:02L HLA-DRB1*04:10L HLA-DRB1*14:54L HLA-DRB1*14:17L
  source 1..11: note = Severe acute respiratory syndrome coronavirus 2
VIGIVNNTVYD

SEQ ID NO: 16554 - protein, 14 aa, Severe acute respiratory syndrome-related coronavirus
  REGION 1..14: note = Table B: HLA-DRB1*04:02L HLA-DRB4*03:01NL HLA-DRB1*14:17L
  source 1..14: note = Severe acute respiratory syndrome coronavirus 2
SPDVDLGDISGINA

SEQ ID NO: 16555 - protein, 11 aa, Severe acute respiratory syndrome-related coronavirus
  REGION 1..11: note = Table B: HLA-DRB1*04:02L HLA-DQA1*02:01-B1*03:03L
  source 1..11: note = Severe acute respiratory syndrome coronavirus 2
LNEVAKNLNES

SEQ ID NO: 16556 - protein, 13 aa, Severe acute respiratory syndrome-related coronavirus
  REGION 1..13: note = Table B: HLA-DRB1*04:02L HLA-DRB1*01:02L HLA-DRB1*08:04L HLA-DRB1*14:01L HLA-DRB1*08:01L HLA-DQA1*03:01-B1*03:02L HLA-DPA1*01:02-B1*04:01L HLA-DQA1*01:03-B1*06:01L HLA-DRB1*04:08L
  source 1..13: note = Severe acute respiratory syndrome coronavirus 2
DLQELGKYEQYIK

SEQ ID NO: 16557 - protein, 12 aa, Severe acute respiratory syndrome-related coronavirus
  REGION 1..12: note = Table B: HLA-DRB1*04:02L HLA-DRB1*04:05L HLA-DRB1*04:08L
  source 1..12: note = Severe acute respiratory syndrome coronavirus 2
EIKDATPSDFVR

SEQ ID NO: 16558 - protein, 11 aa, Severe acute respiratory syndrome-related coronavirus
  REGION 1..11: note = Table B: HLA-DRB1*04:02L HLA-DRB1*08:77L HLA-DRB1*12:01L HLA-DRB1*14:17L HLA-DRB1*16:01L
  source 1..11: note = Severe acute respiratory syndrome coronavirus 2
RATATIPIQAS

SEQ ID NO: 16559 - protein, 11 aa, Severe acute respiratory syndrome-related coronavirus
  REGION 1..11: note = Table B: HLA-DRB1*04:02L HLA-DQA1*03:01-B1*03:02L
  source 1..11: note = Severe acute respiratory syndrome coronavirus 2
YQIGGYTEKWE

SEQ ID NO: 16560 - protein, 11 aa, Severe acute respiratory syndrome-related coronavirus
  REGION 1..11: note = Table B: HLA-DRB1*04:02L HLA-DQA1*01:01-B1*05:01L HLA-DQA1*01:03-B1*06:01L
  source 1..11: note = Severe acute respiratory syndrome coronavirus 2
LSTDTGVEHVT

SEQ ID NO: 16561 - protein, 11 aa, Severe acute respiratory syndrome-related coronavirus
  REGION 1..11: note = Table B: HLA-DRB1*04:02L HLA-DRB1*01:01L HLA-DRB1*11:03L HLA-DRB1*11:04L HLA-DRB1*11:01L HLA-DRB5*01:01L HLA-DRB1*09:01L HLA-DRB1*14:54L HLA-DQA1*05:05-B1*03:01L
  source 1..11: note = Severe acute respiratory syndrome coronavirus 2
STDTGVEHVTF

SEQ ID NO: 16562 - protein, 12 aa, Severe acute respiratory syndrome-related coronavirus
  REGION 1..12: note = Table B: HLA-DRB1*04:02L HLA-DQA1*05:05-B1*03:19L HLA-DQA1*05:05-B1*03:01L
  source 1..12: note = Severe acute respiratory syndrome coronavirus 2
IHTIDGSSGVVN

SEQ ID NO: 16563 - protein, 12 aa, Severe acute respiratory syndrome-related coronavirus
  REGION 1..12: note = Table B: HLA-DRB1*04:02L HLA-DRB1*04:05L HLA-DRB4*03:01NL HLA-DQA1*05:01-B1*02:01L HLA-DRB1*04:10L HLA-DRB1*12:01L HLA-DQA1*03:01-B1*03:02L HLA-DRB1*14:54L HLA-DRB1*14:17L HLA-DRB1*16:01L HLA-DQA1*02:01-B1*03:03L
  source 1..12: note = Severe acute respiratory syndrome coronavirus 2
NPVMEPIYDEPT

SEQ ID NO: 16564 - protein, 12 aa, Severe acute respiratory syndrome-related coronavirus
  REGION 1..12: note = Table B: HLA-DRB1*04:02L HLA-DRB1*04:05L HLA-DQA1*05:01-B1*02:01L HLA-DRB1*04:10L HLA-DRB1*14:17L
  source 1..12: note = Severe acute respiratory syndrome coronavirus 2
PVMEPIYDEPTT

SEQ ID NO: 16565 - protein, 13 aa, Severe acute respiratory syndrome-related coronavirus
  REGION 1..13: note = Table B: HLA-DRB1*04:02L
  source 1..13: note = Severe acute respiratory syndrome coronavirus 2
YSRVKNLNSSRVP

SEQ ID NO: 16566 - protein, 12 aa, Severe acute respiratory syndrome-related coronavirus
  REGION 1..12: note = Table B: HLA-DRB1*04:02L HLA-DRB1*04:05L HLA-DRB1*14:02L HLA-DRB1*08:01L HLA-DRB4*02:01NL HLA-DPA1*01:03-B1*04:02L HLA-DPA1*02:01-B1*13:01L HLA-DRB1*04:08L
  source 1..12: note = Severe acute respiratory syndrome coronavirus 2
DSNGTITVEELK

SEQ ID NO: 16567 - protein, 13 aa, Severe acute respiratory syndrome-related coronavirus
  REGION 1..13: note = Table B: HLA-DRB1*04:02L HLA-DPA1*01:03-B1*03:01L HLA-DRB1*11:03L HLA-DRB1*14:02L HLA-DQA1*05:05-B1*03:19L HLA-DPA1*01:03-B1*04:02L HLA-DRB1*14:54L HLA-DRB1*08:03L
  source 1..13: note = Severe acute respiratory syndrome coronavirus 2
LLQFAYANRNRFL

SEQ ID NO: 16568 - protein, 14 aa, Severe acute respiratory syndrome-related coronavirus
  REGION 1..14: note = Table B: HLA-DRB1*04:02L HLA-DRB1*04:05L HLA-DRB1*01:02L
  source 1..14: note = Severe acute respiratory syndrome coronavirus 2
ASQRVAGDSGFAAY

SEQ ID NO: 16569 - protein, 14 aa, Severe acute respiratory syndrome-related coronavirus
  REGION 1..14: note = Table B: HLA-DRB1*04:02L HLA-DRB1*04:04L HLA-DRB1*04:05L HLA-DRB1*01:02L HLA-DRB1*08:04L HLA-DRB1*11:04L HLA-DRB3*01:01L HLA-DQA1*03:01-B1*03:02L HLA-DRB1*14:54L HLA-DRB1*14:17L HLA-DRB1*04:08L
  source 1..14: note = Severe acute respiratory syndrome coronavirus 2
SQRVAGDSGFAAYS

SEQ ID NO: 16570 - protein, 11 aa, Severe acute respiratory syndrome-related coronavirus
  REGION 1..11: note = Table B: HLA-DRB1*04:02L HLA-DQA1*01:02-B1*06:02L HLA-DPA1*03:01-B1*04:02L HLA-DRB1*12:01L HLA-DRB1*16:01L HLA-DRB1*15:03L
  source 1..11: note = Severe acute respiratory syndrome coronavirus 2
LDYIINLIIKN

SEQ ID NO: 16571 - protein, 12 aa, Severe acute respiratory syndrome-related coronavirus
  REGION 1..12: note = Table B: HLA-DRB1*04:02L HLA-DRB1*08:04L HLA-DRB1*12:02L HLA-DRB1*14:54L HLA-DRB1*14:17L HLA-DRB1*04:08L
  source 1..12: note = Severe acute respiratory syndrome coronavirus 2
DYIINLIIKNLS

SEQ ID NO: 16572 - protein, 11 aa, Severe acute respiratory syndrome-related coronavirus
  REGION 1..11: note = Table B: HLA-DRB1*04:02L HLA-DRB1*04:05L HLA-DRB1*14:01L HLA-DRB1*11:04L
  source 1..11: note = Severe acute respiratory syndrome coronavirus 2
YQLRARSVSPK

SEQ ID NO: 16573 - protein, 13 aa, Severe acute respiratory syndrome-related coronavirus
  REGION 1..13: note = Table B: HLA-DRB1*04:02L HLA-DRB1*04:05L HLA-DPA1*03:01-B1*04:02L HLA-DRB1*14:01L HLA-DPA1*02:01-B1*13:01L HLA-DQA1*05:05-B1*03:01L HLA-DRB1*14:17L HLA-DPA1*01:02-B1*04:01L
  source 1..13: note = Severe acute respiratory syndrome coronavirus 2
IRQEEVQELYSPI

SEQ ID NO: 16574 - protein, 11 aa, Severe acute respiratory syndrome-related coronavirus
  REGION 1..11: note = Table B: HLA-DRB1*04:02L HLA-DRB1*04:05L HLA-DRB4*03:01NL HLA-DQA1*05:01-B1*02:01L HLA-DRB1*04:10L HLA-DQA1*03:01-B1*03:02L HLA-DRB1*14:54L HLA-DRB1*14:17L
  source 1..11: note = Severe acute respiratory syndrome coronavirus 2
VPINTNSSPDD

SEQ ID NO: 16575 - protein, 15 aa, Severe acute respiratory syndrome-related coronavirus
  REGION 1..15: note = Table B: HLA-DRB1*04:02L HLA-DRB1*04:05L HLA-DRB1*01:02L HLA-DPA1*01:03-B1*03:01L HLA-DQA1*01:01-B1*05:01L HLA-DRB1*08:01L HLA-DRB4*02:01NL HLA-DRB1*04:10L HLA-DPA1*01:03-B1*04:02L HLA-DRB1*12:01L
  REGION 1..15: note = CONT. FROM ABOVE: HLA-DPA1*02:01-B1*13:01L HLA-DPA1*01:03-B1*104 :01L HLA-DRB1*16:01L HLA-DRB1*15:03L
  source 1..15: note = Severe acute respiratory syndrome coronavirus 2
NPANNAAIVLQLPQG

SEQ ID NO: 16576 - protein, 12 aa, Severe acute respiratory syndrome-related coronavirus
  REGION 1..12: note = Table B: HLA-DRB1*04:02L HLA-DQA1*01:02-B1*06:02L HLA-DRB1*08:01L HLA-DRB1*12:01L HLA-DRB1*16:01L HLA-DRB1*04:08L HLA-DRB1*15:03L
  source 1..12: note = Severe acute respiratory syndrome coronavirus 2
ALALLLLDRLNQ

SEQ ID NO: 16577 - protein, 12 aa, Severe acute respiratory syndrome-related coronavirus
  REGION 1..12: note = Table B: HLA-DRB1*04:02L HLA-DQA1*01:02-B1*06:02L HLA-DRB1*08:01L HLA-DQA1*02:01-B1*03:03L
  source 1..12: note = Severe acute respiratory syndrome coronavirus 2
LNQLESKMSGKG

SEQ ID NO: 16578 - protein, 13 aa, Severe acute respiratory syndrome-related coronavirus
  REGION 1..13: note = Table B: HLA-DRB1*04:02L HLA-DRB1*14:01L HLA-DRB3*01:01L
  source 1..13: note = Severe acute respiratory syndrome coronavirus 2
TKAYNVTQAFGRR

SEQ ID NO: 16579 - protein, 11 aa, Severe acute respiratory syndrome-related coronavirus
  REGION 1..11: note = Table B: HLA-DRB1*04:02L HLA-DQA1*01:03-B1*06:01L
  source 1..11: note = Severe acute respiratory syndrome coronavirus 2
NFGDQELIRQG

SEQ ID NO: 16580 - protein, 12 aa, Severe acute respiratory syndrome-related coronavirus
  REGION 1..12: note = Table B: HLA-DRB1*04:02L HLA-DRB1*01:02L HLA-DRB1*08:04L HLA-DRB3*02:01L HLA-DRB1*11:03L HLA-DRB1*04:10L HLA-DRB1*09:01L HLA-DRB1*12:02L HLA-DRB1*14:54L HLA-DQA1*05:05-B1*03:01L HLA-DRB1*14:17L HLA-DRB1*07:01L HLA-DRB1*04:08L
  source 1..12: note = Severe acute respiratory syndrome coronavirus 2
IAQFAPSASAFF

SEQ ID NO: 16581 - protein, 12 aa, Severe acute respiratory syndrome-related coronavirus
  REGION 1..12: note = Table B: HLA-DRB1*04:02L HLA-DRB1*01:02L HLA-DRB3*02:01L HLA-DRB1*11:03L HLA-DRB1*04:10L HLA-DRB1*09:01L HLA-DRB1*12:02L HLA-DRB1*14:54L HLA-DQA1*05:05-B1*03:01L HLA-DRB1*14:17L HLA-DRB1*07:01L
  source 1..12: note = Severe acute respiratory syndrome coronavirus 2
AQFAPSASAFFG

SEQ ID NO: 16582 - protein, 12 aa, Severe acute respiratory syndrome-related coronavirus
  REGION 1..12: note = Table B: HLA-DRB1*04:02L HLA-DRB1*01:02L HLA-DPA1*01:03-B1*104:01L HLA-DQA1*05:05-B1*03:01L
  source 1..12: note = Severe acute respiratory syndrome coronavirus 2
RIGMEVTPSGTW

SEQ ID NO: 16583 - protein, 14 aa, Severe acute respiratory syndrome-related coronavirus
  REGION 1..14: note = Table B: HLA-DRB1*04:02L HLA-DRB1*04:05L HLA-DRB1*04:10L HLA-DPA1*02:01-B1*13:01L HLA-DPA1*01:03-B1*104:01L HLA-DRB1*04:08L
  source 1..14: note = Severe acute respiratory syndrome coronavirus 2
KQQTVTLLPAADLD

SEQ ID NO: 16584 - protein, 13 aa, Severe acute respiratory syndrome-related coronavirus
  REGION 1..13: note = Table B: HLA-DRB1*04:02L HLA-DRB1*04:04L HLA-DRB1*04:05L HLA-DRB4*03:01NL HLA-DQA1*01-B1*05L HLA-DRB1*04:10L HLA-DQA1*03:01-B1*03:02L HLA-DRB1*14:54L HLA-DRB1*16:01L HLA-DRB1*04:08L HLA-DQA1*02:01-B1*03:03L
  source 1..13: note = Severe acute respiratory syndrome coronavirus 2
SKQLQQSMSSADS

SEQ ID NO: 16585 - protein, 14 aa, Severe acute respiratory syndrome-related coronavirus
  REGION 1..14: note = Table B: HLA-DRB1*04:04L HLA-DRB1*08:04L HLA-DPA1*01:03-B1*03:01L HLA-DRB1*11:01L HLA-DRB3*01:01L HLA-DPA1*02:01-B1*13:01L HLA-DRB1*07:01L
  source 1..14: note = Severe acute respiratory syndrome coronavirus 2
ESLVPGFNEKTHVQ

SEQ ID NO: 16586 - protein, 16 aa, Severe acute respiratory syndrome-related coronavirus
  REGION 1..16: note = Table B: HLA-DRB1*04:04L
  source 1..16: note = Severe acute respiratory syndrome coronavirus 2
EKTHVQLSLPVLQVRD

SEQ ID NO: 16587 - protein, 13 aa, Severe acute respiratory syndrome-related coronavirus
  REGION 1..13: note = Table B: HLA-DRB1*04:04L
  source 1..13: note = Severe acute respiratory syndrome coronavirus 2
SLPVLQVRDVLVR

SEQ ID NO: 16588 - protein, 14 aa, Severe acute respiratory syndrome-related coronavirus
  REGION 1..14: note = Table B: HLA-DRB1*04:04L HLA-DPA1*02:01-B1*13:01L
  source 1..14: note = Severe acute respiratory syndrome coronavirus 2
GDSVEEVLSEARQH

SEQ ID NO: 16589 - protein, 15 aa, Severe acute respiratory syndrome-related coronavirus
  REGION 1..15: note = Table B: HLA-DRB1*04:04L HLA-DRB3*01:01L HLA-DRB1*07:01L HLA-DRB1*08:03L
  source 1..15: note = Severe acute respiratory syndrome coronavirus 2
VEVEKGVLPQLEQPY

SEQ ID NO: 16590 - protein, 17 aa, Severe acute respiratory syndrome-related coronavirus
  REGION 1..17: note = Table B: HLA-DRB1*04:04L
  source 1..17: note = Severe acute respiratory syndrome coronavirus 2
SGETLGVLVPHVGEIPV

SEQ ID NO: 16591 - protein, 13 aa, Severe acute respiratory syndrome-related coronavirus
  REGION 1..13: note = Table B: HLA-DRB1*04:04L HLA-DRB1*04:10L HLA-DRB3*01:01L HLA-DPA1*01:02-B1*04:01L
  source 1..13: note = Severe acute respiratory syndrome coronavirus 2
VPHVGEIPVAYRK

SEQ ID NO: 16592 - protein, 16 aa, Severe acute respiratory syndrome-related coronavirus
  REGION 1..16: note = Table B: HLA-DRB1*04:04L
  source 1..16: note = Severe acute respiratory syndrome coronavirus 2
RKVLLRKNGNKGAGGH

SEQ ID NO: 16593 - protein, 14 aa, Severe acute respiratory syndrome-related coronavirus
  REGION 1..14: note = Table B: HLA-DRB1*04:04L HLA-DRB1*08:01L
  source 1..14: note = Severe acute respiratory syndrome coronavirus 2
VTRELMRELNGGAY

SEQ ID NO: 16594 - protein, 12 aa, Severe acute respiratory syndrome-related coronavirus
  REGION 1..12: note = Table B: HLA-DRB1*04:04L HLA-DRB1*04:05L HLA-DRB1*04:10L HLA-DRB1*04:08L
  source 1..12: note = Severe acute respiratory syndrome coronavirus 2
ELMRELNGGAYT

SEQ ID NO: 16595 - protein, 13 aa, Severe acute respiratory syndrome-related coronavirus
  REGION 1..13: note = Table B: HLA-DRB1*04:04L HLA-DRB1*08:04L HLA-DRB3*02:01L HLA-DRB1*11:03L HLA-DRB1*11:04L HLA-DRB3*01:01L HLA-DRB1*14:54L HLA-DRB1*04:08L
  source 1..13: note = Severe acute respiratory syndrome coronavirus 2
EQLDFIDTKRGVY

SEQ ID NO: 16596 - protein, 13 aa, Severe acute respiratory syndrome-related coronavirus
  REGION 1..13: note = Table B: HLA-DRB1*04:04L HLA-DRB1*01:02L HLA-DPA1*02:01-B1*13:01L HLA-DPA1*01:02-B1*04:01L HLA-DRB1*07:01L
  source 1..13: note = Severe acute respiratory syndrome coronavirus 2
IDTKRGVYCCREH

SEQ ID NO: 16597 - protein, 14 aa, Severe acute respiratory syndrome-related coronavirus
  REGION 1..14: note = Table B: HLA-DRB1*04:04L HLA-DRB1*01:02L HLA-DPA1*02:01-B1*13:01L HLA-DRB1*07:01L HLA-DRB1*04:08L
  source 1..14: note = Severe acute respiratory syndrome coronavirus 2
DTKRGVYCCREHEH

SEQ ID NO: 16598 - protein, 12 aa, Severe acute respiratory syndrome-related coronavirus
  REGION 1..12: note = Table B: HLA-DRB1*04:04L HLA-DQA1*01:02-B1*06:02L HLA-DPA1*03:01-B1*04:02L HLA-DRB1*14:01L HLA-DRB1*08:01L HLA-DQA1*05:01-B1*02:01L HLA-DPA1*02:01-B1*13:01L HLA-DPA1*03:01-B1*105:01L
  source 1..12: note = Severe acute respiratory syndrome coronavirus 2
EIAWYTERSEKS

SEQ ID NO: 16599 - protein, 12 aa, Severe acute respiratory syndrome-related coronavirus
  REGION 1..12: note = Table B: HLA-DRB1*04:04L HLA-DRB1*11:04L HLA-DRB1*08:01L HLA-DRB1*11:01L HLA-DPA1*01:03-B1*04:01L HLA-DRB1*09:01L HLA-DRB3*01:01L HLA-DRB1*15:01L
  source 1..12: note = Severe acute respiratory syndrome coronavirus 2
KSYELQTPFEIK

SEQ ID NO: 16600 - protein, 14 aa, Severe acute respiratory syndrome-related coronavirus
  REGION 1..14: note = Table B: HLA-DRB1*04:04L HLA-DRB1*04:05L HLA-DRB1*01:02L HLA-DRB1*11:03L HLA-DRB1*11:01L HLA-DRB3*01:01L HLA-DRB1*16:01L
  source 1..14: note = Severe acute respiratory syndrome coronavirus 2
VFPLNSIIKTIQPR

SEQ ID NO: 16601 - protein, 12 aa, Severe acute respiratory syndrome-related coronavirus
  REGION 1..12: note = Table B: HLA-DRB1*04:04L HLA-DQA1*01:01-B1*05:01L HLA-DRB1*11:01L HLA-DRB3*01:01L HLA-DRB1*10:01L HLA-DRB1*08:03L
  source 1..12: note = Severe acute respiratory syndrome coronavirus 2
SIIKTIQPRVEK

SEQ ID NO: 16602 - protein, 12 aa, Severe acute respiratory syndrome-related coronavirus
  REGION 1..12: note = Table B: HLA-DRB1*04:04L HLA-DRB1*01:02L HLA-DRB1*08:04L HLA-DRB3*02:01L HLA-DPA1*01:03-B1*03:01L HLA-DRB1*11:03L HLA-DQA1*01:01-B1*05:01L HLA-DRB1*08:01L HLA-DPA1*02:01-B1*13:01L HLA-DPA1*01:03-B1*104:01L
  REGION 1..12: note = CONT. FROM ABOVE: HLA-DRB1*07:01L HLA-DRB1*04:08L HLA-DRB1*08:03 L HLA-DRB1*15:03L
  source 1..12: note = Severe acute respiratory syndrome coronavirus 2
IRSVYPVASPNE

SEQ ID NO: 16603 - protein, 14 aa, Severe acute respiratory syndrome-related coronavirus
  REGION 1..14: note = Table B: HLA-DRB1*04:04L HLA-DRB1*01:02L HLA-DPA1*01:03-B1*03:01L HLA-DPA1*02:01-B1*13:01L HLA-DRB1*04:08L HLA-DRB1*15:03L
  source 1..14: note = Severe acute respiratory syndrome coronavirus 2
RSVYPVASPNECNQ

SEQ ID NO: 16604 - protein, 14 aa, Severe acute respiratory syndrome-related coronavirus
  REGION 1..14: note = Table B: HLA-DRB1*04:04L HLA-DRB1*08:77L HLA-DQA1*01:01-B1*05:01L HLA-DPA1*01:03-B1*04:01L HLA-DRB1*04:10L HLA-DRB1*09:01L HLA-DPA1*01:03-B1*104:01L HLA-DRB1*10:01L
  source 1..14: note = Severe acute respiratory syndrome coronavirus 2
NDNLLEILQKEKVN

SEQ ID NO: 16605 - protein, 14 aa, Severe acute respiratory syndrome-related coronavirus
  REGION 1..14: note = Table B: HLA-DRB1*04:04L HLA-DRB1*03:01L HLA-DRB1*11:04L HLA-DRB1*14:02L HLA-DQA1*05:05-B1*03:19L HLA-DRB3*01:01L HLA-DRB1*04:08L
  source 1..14: note = Severe acute respiratory syndrome coronavirus 2
EILQKEKVNINIVG

SEQ ID NO: 16606 - protein, 13 aa, Severe acute respiratory syndrome-related coronavirus
  REGION 1..13: note = Table B: HLA-DRB1*04:04L HLA-DRB1*04:05L HLA-DRB1*14:54L HLA-DRB1*04:08L
  source 1..13: note = Severe acute respiratory syndrome coronavirus 2
VNINIVGDFKLNE

SEQ ID NO: 16607 - protein, 11 aa, Severe acute respiratory syndrome-related coronavirus
  REGION 1..11: note = Table B: HLA-DRB1*04:04L HLA-DRB1*08:04L HLA-DRB1*11:04L HLA-DRB1*08:01L HLA-DRB1*04:10L HLA-DRB3*01:01L HLA-DRB1*08:03L
  source 1..11: note = Severe acute respiratory syndrome coronavirus 2
FVETVKGLDYK

SEQ ID NO: 16608 - protein, 14 aa, Severe acute respiratory syndrome-related coronavirus
  REGION 1..14: note = Table B: HLA-DRB1*04:04L HLA-DRB1*04:05L
  source 1..14: note = Severe acute respiratory syndrome coronavirus 2
KQIVESCGNFKVTK

SEQ ID NO: 16609 - protein, 13 aa, Severe acute respiratory syndrome-related coronavirus
  REGION 1..13: note = Table B: HLA-DRB1*04:04L HLA-DQA1*01:01-B1*05:01L HLA-DRB1*04:10L HLA-DRB1*04:08L
  source 1..13: note = Severe acute respiratory syndrome coronavirus 2
IGEQKSILSPLYA

SEQ ID NO: 16610 - protein, 14 aa, Severe acute respiratory syndrome-related coronavirus
  REGION 1..14: note = Table B: HLA-DRB1*04:04L HLA-DPA1*01:03-B1*02:01L
  source 1..14: note = Severe acute respiratory syndrome coronavirus 2
VRSIFSRTLETAQN

SEQ ID NO: 16611 - protein, 15 aa, Severe acute respiratory syndrome-related coronavirus
  REGION 1..15: note = Table B: HLA-DRB1*04:04L HLA-DPA1*03:01-B1*105:01L HLA-DQA1*05:05-B1*03:01L
  source 1..15: note = Severe acute respiratory syndrome coronavirus 2
NSVRVLQKAAITILD

SEQ ID NO: 16612 - protein, 15 aa, Severe acute respiratory syndrome-related coronavirus
  REGION 1..15: note = Table B: HLA-DRB1*04:04L HLA-DRB3*02:01L HLA-DPA1*03:01-B1*04:02L HLA-DRB1*11:03L HLA-DRB1*14:02L HLA-DRB1*08:01L HLA-DRB3*01:01L
  source 1..15: note = Severe acute respiratory syndrome coronavirus 2
SVRVLQKAAITILDG

SEQ ID NO: 16613 - protein, 12 aa, Severe acute respiratory syndrome-related coronavirus
  REGION 1..12: note = Table B: HLA-DRB1*04:04L HLA-DRB1*08:04L HLA-DRB3*01:01L HLA-DPA1*01:03-B1*02:01L
  source 1..12: note = Severe acute respiratory syndrome coronavirus 2
NIFGTVYEKLKP

SEQ ID NO: 16614 - protein, 12 aa, Severe acute respiratory syndrome-related coronavirus
  REGION 1..12: note = Table B: HLA-DRB1*04:04L HLA-DRB3*02:01L HLA-DRB1*11:03L HLA-DRB3*01:01L HLA-DRB1*07:01L HLA-DRB1*08:03L
  source 1..12: note = Severe acute respiratory syndrome coronavirus 2
RDGWEIVKFIST

SEQ ID NO: 16615 - protein, 14 aa, Severe acute respiratory syndrome-related coronavirus
  REGION 1..14: note = Table B: HLA-DRB1*04:04L HLA-DPA1*02:01-B1*13:01L HLA-DPA1*01:03-B1*02:01L
  source 1..14: note = Severe acute respiratory syndrome coronavirus 2
IKESVQTFFKLVNK

SEQ ID NO: 16616 - protein, 15 aa, Severe acute respiratory syndrome-related coronavirus
  REGION 1..15: note = Table B: HLA-DRB1*04:04L HLA-DPA1*01:03-B1*104:01L
  source 1..15: note = Severe acute respiratory syndrome coronavirus 2
KALNLGETFVTHSKG

SEQ ID NO: 16617 - protein, 14 aa, Severe acute respiratory syndrome-related coronavirus
  REGION 1..14: note = Table B: HLA-DRB1*04:04L HLA-DRB1*04:05L HLA-DQA1*01:02-B1*06:02L HLA-DRB1*14:01L HLA-DQA1*03:01-B1*03:02L HLA-DQA1*01:03-B1*06:01L
  source 1..14: note = Severe acute respiratory syndrome coronavirus 2
PKEIIFLEGETLPT

SEQ ID NO: 16618 - protein, 14 aa, Severe acute respiratory syndrome-related coronavirus
  REGION 1..14: note = Table B: HLA-DRB1*04:04L HLA-DQA1*01:02-B1*06:02L
  source 1..14: note = Severe acute respiratory syndrome coronavirus 2
DERIDKVLNEKCSA

SEQ ID NO: 16619 - protein, 12 aa, Severe acute respiratory syndrome-related coronavirus
  REGION 1..12: note = Table B: HLA-DRB1*04:04L HLA-DRB1*01:02L HLA-DRB1*14:01L HLA-DRB1*15:03L
  source 1..12: note = Severe acute respiratory syndrome coronavirus 2
YGTEDDYQGKPL

SEQ ID NO: 16620 - protein, 13 aa, Severe acute respiratory syndrome-related coronavirus
  REGION 1..13: note = Table B: HLA-DRB1*04:04L HLA-DRB1*04:08L
  source 1..13: note = Severe acute respiratory syndrome coronavirus 2
QTIVEVQPQLEME

SEQ ID NO: 16621 - protein, 14 aa, Severe acute respiratory syndrome-related coronavirus
  REGION 1..14: note = Table B: HLA-DRB1*04:04L HLA-DRB1*11:03L HLA-DRB1*11:01L HLA-DRB1*04:10L HLA-DRB3*01:01L HLA-DPA1*01:03-B1*02:01L HLA-DRB1*08:03L
  source 1..14: note = Severe acute respiratory syndrome coronavirus 2
VQTIEVNSFSGYLK

SEQ ID NO: 16622 - protein, 15 aa, Severe acute respiratory syndrome-related coronavirus
  REGION 1..15: note = Table B: HLA-DRB1*04:04L HLA-DRB1*09:01L
  source 1..15: note = Severe acute respiratory syndrome coronavirus 2
IEVNSFSGYLKLTDN

SEQ ID NO: 16623 - protein, 12 aa, Severe acute respiratory syndrome-related coronavirus
  REGION 1..12: note = Table B: HLA-DRB1*04:04L HLA-DRB3*02:01L HLA-DRB1*11:03L HLA-DRB1*11:04L HLA-DRB1*08:01L HLA-DRB1*09:01L HLA-DRB1*12:02L HLA-DRB3*01:01L
  source 1..12: note = Severe acute respiratory syndrome coronavirus 2
GYLKLTDNVYIK

SEQ ID NO: 16624 - protein, 13 aa, Severe acute respiratory syndrome-related coronavirus
  REGION 1..13: note = Table B: HLA-DRB1*04:04L HLA-DRB1*11:03L
  source 1..13: note = Severe acute respiratory syndrome coronavirus 2
NVYIKNADIVEEA

SEQ ID NO: 16625 - protein, 13 aa, Severe acute respiratory syndrome-related coronavirus
  REGION 1..13: note = Table B: HLA-DRB1*04:04L HLA-DRB3*01:01L
  source 1..13: note = Severe acute respiratory syndrome coronavirus 2
PTVVVNAANVYLK

SEQ ID NO: 16626 - protein, 15 aa, Severe acute respiratory syndrome-related coronavirus
  REGION 1..15: note = Table B: HLA-DRB1*04:04L HLA-DPA1*01:03-B1*03:01L HLA-DQA1*01:01-B1*05:01L HLA-DRB3*01:01L HLA-DPA1*02:01-B1*13:01L HLA-DPA1*01:03-B1*104:01L
  source 1..15: note = Severe acute respiratory syndrome coronavirus 2
VVVNAANVYLKHGGG

SEQ ID NO: 16627 - protein, 14 aa, Severe acute respiratory syndrome-related coronavirus
  REGION 1..14: note = Table B: HLA-DRB1*04:04L HLA-DPA1*03:01-B1*04:02L HLA-DRB1*15:01L
  source 1..14: note = Severe acute respiratory syndrome coronavirus 2
AANVYLKHGGGVAG

SEQ ID NO: 16628 - protein, 11 aa, Severe acute respiratory syndrome-related coronavirus
  REGION 1..11: note = Table B: HLA-DRB1*04:04L HLA-DRB1*04:05L HLA-DRB1*01:01L HLA-DRB1*03:01L HLA-DRB1*11:01L HLA-DRB5*01:01L HLA-DRB1*04:10L HLA-DPA1*01:03-B1*04:02L HLA-DRB3*01:01L HLA-DPA1*01:03-B1*02:01L HLA-DRB1*04:08L
  source 1..11: note = Severe acute respiratory syndrome coronavirus 2
YIATNGPLKVG

SEQ ID NO: 16629 - protein, 12 aa, Severe acute respiratory syndrome-related coronavirus
  REGION 1..12: note = Table B: HLA-DRB1*04:04L HLA-DRB1*01:02L HLA-DRB1*14:01L HLA-DRB1*12:02L HLA-DPA1*03:01-B1*105:01L HLA-DQA1*05:05-B1*03:01L HLA-DRB1*04:08L
  source 1..12: note = Severe acute respiratory syndrome coronavirus 2
GEDIQLLKSAYE

SEQ ID NO: 16630 - protein, 14 aa, Severe acute respiratory syndrome-related coronavirus
  REGION 1..14: note = Table B: HLA-DRB1*04:04L
  source 1..14: note = Severe acute respiratory syndrome coronavirus 2
DIQLLKSAYENFNQ

SEQ ID NO: 16631 - protein, 14 aa, Severe acute respiratory syndrome-related coronavirus
  REGION 1..14: note = Table B: HLA-DRB1*04:04L HLA-DRB1*08:01L HLA-DPA1*01:03-B1*02:01L
  source 1..14: note = Severe acute respiratory syndrome coronavirus 2
IQLLKSAYENFNQH

SEQ ID NO: 16632 - protein, 11 aa, Severe acute respiratory syndrome-related coronavirus
  REGION 1..11: note = Table B: HLA-DRB1*04:04L HLA-DRB1*08:04L HLA-DRB5*01:01L HLA-DRB1*13:01L HLA-DRB1*04:10L HLA-DRB1*12:02L HLA-DRB3*01:01L HLA-DRB1*14:54L HLA-DRB1*08:02L HLA-DRB1*15:01L
  source 1..11: note = Severe acute respiratory syndrome coronavirus 2
GIFGADPIHSL

SEQ ID NO: 16633 - protein, 11 aa, Severe acute respiratory syndrome-related coronavirus
  REGION 1..11: note = Table B: HLA-DRB1*04:04L HLA-DRB1*08:04L HLA-DRB1*14:54L HLA-DPA1*01:03-B1*02:01L
  source 1..11: note = Severe acute respiratory syndrome coronavirus 2
IFGADPIHSLR

SEQ ID NO: 16634 - protein, 13 aa, Severe acute respiratory syndrome-related coronavirus
  REGION 1..13: note = Table B: HLA-DRB1*04:04L HLA-DRB1*11:03L HLA-DRB1*09:01L HLA-DRB3*01:01L HLA-DRB1*14:54L
  source 1..13: note = Severe acute respiratory syndrome coronavirus 2
NVYLAVFDKNLYD

SEQ ID NO: 16635 - protein, 14 aa, Severe acute respiratory syndrome-related coronavirus
  REGION 1..14: note = Table B: HLA-DRB1*04:04L HLA-DRB1*08:01L HLA-DPA1*01:03-B1*02:01L
  source 1..14: note = Severe acute respiratory syndrome coronavirus 2
DKLVSSFLEMKSEK

SEQ ID NO: 16636 - protein, 11 aa, Severe acute respiratory syndrome-related coronavirus
  REGION 1..11: note = Table B: HLA-DRB1*04:04L HLA-DRB1*01:02L HLA-DRB1*14:01L HLA-DRB1*12:01L HLA-DRB1*10:01L HLA-DRB1*08:03L
  source 1..11: note = Severe acute respiratory syndrome coronavirus 2
SSFLEMKSEKQ

SEQ ID NO: 16637 - protein, 14 aa, Severe acute respiratory syndrome-related coronavirus
  REGION 1..14: note = Table B: HLA-DRB1*04:04L HLA-DRB1*01:01L HLA-DRB1*03:01L HLA-DRB1*07:01L
  source 1..14: note = Severe acute respiratory syndrome coronavirus 2
VEQKIAEIPKEEVK

SEQ ID NO: 16638 - protein, 14 aa, Severe acute respiratory syndrome-related coronavirus
  REGION 1..14: note = Table B: HLA-DRB1*04:04L HLA-DRB1*03:01L HLA-DRB1*08:02L
  source 1..14: note = Severe acute respiratory syndrome coronavirus 2
EQKIAEIPKEEVKP

SEQ ID NO: 16639 - protein, 12 aa, Severe acute respiratory syndrome-related coronavirus
  REGION 1..12: note = Table B: HLA-DRB1*04:04L HLA-DRB1*04:05L HLA-DRB1*01:02L HLA-DRB1*08:04L HLA-DRB3*02:01L HLA-DRB1*11:03L HLA-DRB1*11:04L HLA-DRB1*08:01L HLA-DRB1*11:01L HLA-DRB3*01:01L HLA-DQA1*05:05-B1*03:01L HLA-DRB1*04:08L
  source 1..12: note = Severe acute respiratory syndrome coronavirus 2
IAEIPKEEVKPF

SEQ ID NO: 16640 - protein, 16 aa, Severe acute respiratory syndrome-related coronavirus
  REGION 1..16: note = Table B: HLA-DRB1*04:04L
  source 1..16: note = Severe acute respiratory syndrome coronavirus 2
TENLLLYIDINGNLHP

SEQ ID NO: 16641 - protein, 17 aa, Severe acute respiratory syndrome-related coronavirus
  REGION 1..17: note = Table B: HLA-DRB1*04:04L HLA-DRB3*02:01L HLA-DPA1*01:02-B1*04:01L
  source 1..17: note = Severe acute respiratory syndrome coronavirus 2
HPDSATLVSDIDITFLK

SEQ ID NO: 16642 - protein, 15 aa, Severe acute respiratory syndrome-related coronavirus
  REGION 1..15: note = Table B: HLA-DRB1*04:04L
  source 1..15: note = Severe acute respiratory syndrome coronavirus 2
IDITFLKKDAPYIVG

SEQ ID NO: 16643 - protein, 13 aa, Severe acute respiratory syndrome-related coronavirus
  REGION 1..13: note = Table B: HLA-DRB1*04:04L HLA-DRB1*11:01L HLA-DRB4*02:01NL
  source 1..13: note = Severe acute respiratory syndrome coronavirus 2
EGVLTAVVIPTKK

SEQ ID NO: 16644 - protein, 14 aa, Severe acute respiratory syndrome-related coronavirus
  REGION 1..14: note = Table B: HLA-DRB1*04:04L HLA-DRB1*08:04L HLA-DRB1*11:03L HLA-DRB1*11:04L HLA-DRB1*08:01L HLA-DRB1*04:10L HLA-DRB1*14:54L HLA-DRB1*14:17L HLA-DRB1*07:01L HLA-DRB1*08:03L
  source 1..14: note = Severe acute respiratory syndrome coronavirus 2
AKALRKVPTDNYIT

SEQ ID NO: 16645 - protein, 11 aa, Severe acute respiratory syndrome-related coronavirus
  REGION 1..11: note = Table B: HLA-DRB1*04:04L HLA-DRB1*04:05L HLA-DRB1*01:01L HLA-DRB1*08:77L HLA-DPA1*03:01-B1*04:02L HLA-DRB1*11:03L HLA-DRB1*11:04L HLA-DRB1*08:01L HLA-DRB1*04:10L HLA-DRB1*12:02L HLA-DRB1*14:54L HLA-DPA1*01:02-B1*04:01L HLA-DRB1*07:01L
  REGION 1..11: note = CONT. FROM ABOVE: HLA-DRB1*10:01L HLA-DRB1*08:03L
  source 1..11: note = Severe acute respiratory syndrome coronavirus 2
ITTYPGQGLNG

SEQ ID NO: 16646 - protein, 13 aa, Severe acute respiratory syndrome-related coronavirus
  REGION 1..13: note = Table B: HLA-DRB1*04:04L HLA-DRB1*08:04L HLA-DRB1*11:04L HLA-DRB1*04:10L HLA-DRB3*01:01L
  source 1..13: note = Severe acute respiratory syndrome coronavirus 2
LNGYTVEEAKTVL

SEQ ID NO: 16647 - protein, 11 aa, Severe acute respiratory syndrome-related coronavirus
  REGION 1..11: note = Table B: HLA-DRB1*04:04L HLA-DRB1*11:03L HLA-DRB1*11:04L HLA-DRB1*12:02L HLA-DRB3*01:01L HLA-DRB1*14:54L HLA-DRB1*04:08L
  source 1..11: note = Severe acute respiratory syndrome coronavirus 2
YTVEEAKTVLK

SEQ ID NO: 16648 - protein, 11 aa, Severe acute respiratory syndrome-related coronavirus
  REGION 1..11: note = Table B: HLA-DRB1*04:04L
  source 1..11: note = Severe acute respiratory syndrome coronavirus 2
FYILPSIISNE

SEQ ID NO: 16649 - protein, 12 aa, Severe acute respiratory syndrome-related coronavirus
  REGION 1..12: note = Table B: HLA-DRB1*04:04L HLA-DRB1*08:04L HLA-DPA1*01:03-B1*03:01L HLA-DRB1*14:01L HLA-DQA1*01:01-B1*05:01L HLA-DRB1*08:01L HLA-DQA1*01-B1*05L HLA-DQA1*05:05-B1*03:19L HLA-DRB1*04:10L
  REGION 1..12: note = CONT. FROM ABOVE: HLA-DPA1*02:01-B1*13:01L HLA-DRB1*14:54L HLA-D RB1*15:03L
  source 1..12: note = Severe acute respiratory syndrome coronavirus 2
YILPSIISNEKQ

SEQ ID NO: 16650 - protein, 13 aa, Severe acute respiratory syndrome-related coronavirus
  REGION 1..13: note = Table B: HLA-DRB1*04:04L HLA-DRB1*01:01L HLA-DRB1*08:04L HLA-DRB1*11:04L HLA-DRB1*14:02L HLA-DRB1*08:01L HLA-DRB3*01:01L HLA-DRB1*14:54L HLA-DRB1*10:01L HLA-DRB1*08:03L HLA-DRB1*15:01L
  source 1..13: note = Severe acute respiratory syndrome coronavirus 2
KQEILGTVSWNLR

SEQ ID NO: 16651 - protein, 13 aa, Severe acute respiratory syndrome-related coronavirus
  REGION 1..13: note = Table B: HLA-DRB1*04:04L HLA-DPA1*02:01-B1*13:01L HLA-DPA1*01:02-B1*04:01L
  source 1..13: note = Severe acute respiratory syndrome coronavirus 2
LREMLAHAEETRK

SEQ ID NO: 16652 - protein, 14 aa, Severe acute respiratory syndrome-related coronavirus
  REGION 1..14: note = Table B: HLA-DRB1*04:04L HLA-DRB1*08:04L HLA-DRB1*13:01L
  source 1..14: note = Severe acute respiratory syndrome coronavirus 2
TKAIVSTIQRKYKG

SEQ ID NO: 16653 - protein, 12 aa, Severe acute respiratory syndrome-related coronavirus
  REGION 1..12: note = Table B: HLA-DRB1*04:04L
  source 1..12: note = Severe acute respiratory syndrome coronavirus 2
KIQEGVVDYGAR

SEQ ID NO: 16654 - protein, 13 aa, Severe acute respiratory syndrome-related coronavirus
  REGION 1..13: note = Table B: HLA-DRB1*04:04L HLA-DRB1*04:05L HLA-DRB4*03:01NL HLA-DRB1*04:10L HLA-DRB1*16:01L HLA-DRB1*04:08L
  source 1..13: note = Severe acute respiratory syndrome coronavirus 2
KTTVASLINTLND

SEQ ID NO: 16655 - protein, 13 aa, Severe acute respiratory syndrome-related coronavirus
  REGION 1..13: note = Table B: HLA-DRB1*04:04L HLA-DRB1*12:01L HLA-DRB1*04:08L
  source 1..13: note = Severe acute respiratory syndrome coronavirus 2
VASLINTLNDLNE

SEQ ID NO: 16656 - protein, 14 aa, Severe acute respiratory syndrome-related coronavirus
  REGION 1..14: note = Table B: HLA-DRB1*04:04L HLA-DPA1*01:03-B1*02:01L
  source 1..14: note = Severe acute respiratory syndrome coronavirus 2
NETLVTMPLGYVTH

SEQ ID NO: 16657 - protein, 14 aa, Severe acute respiratory syndrome-related coronavirus
  REGION 1..14: note = Table B: HLA-DRB1*04:04L HLA-DRB1*04:05L HLA-DRB1*08:04L HLA-DPA1*01:03-B1*02:01L
  source 1..14: note = Severe acute respiratory syndrome coronavirus 2
ETLVTMPLGYVTHG

SEQ ID NO: 16658 - protein, 16 aa, Severe acute respiratory syndrome-related coronavirus
  REGION 1..16: note = Table B: HLA-DRB1*04:04L HLA-DRB1*01:01L HLA-DRB1*11:04L HLA-DRB1*07:01L
  source 1..16: note = Severe acute respiratory syndrome coronavirus 2
VTHGLNLEEAARYMRS

SEQ ID NO: 16659 - protein, 14 aa, Severe acute respiratory syndrome-related coronavirus
  REGION 1..14: note = Table B: HLA-DRB1*04:04L HLA-DRB3*02:01L
  source 1..14: note = Severe acute respiratory syndrome coronavirus 2
SPDAVTAYNGYLTS

SEQ ID NO: 16660 - protein, 14 aa, Severe acute respiratory syndrome-related coronavirus
  REGION 1..14: note = Table B: HLA-DRB1*04:04L HLA-DQA1*05:05-B1*03:19L
  source 1..14: note = Severe acute respiratory syndrome coronavirus 2
TAYNGYLTSSSKTP

SEQ ID NO: 16661 - protein, 13 aa, Severe acute respiratory syndrome-related coronavirus
  REGION 1..13: note = Table B: HLA-DRB1*04:04L HLA-DPA1*01:03-B1*03:01L HLA-DRB1*11:01L HLA-DPA1*02:01-B1*13:01L HLA-DRB1*07:01L
  source 1..13: note = Severe acute respiratory syndrome coronavirus 2
YNGYLTSSSKTPE

SEQ ID NO: 16662 - protein, 12 aa, Severe acute respiratory syndrome-related coronavirus
  REGION 1..12: note = Table B: HLA-DRB1*04:04L HLA-DPA1*01:03-B1*03:01L HLA-DPA1*03:01-B1*04:02L HLA-DQA1*01:01-B1*05:01L HLA-DRB1*11:01L HLA-DRB5*01:01L HLA-DRB1*09:01L HLA-DPA1*01:03-B1*04:02L HLA-DPA1*02:01-B1*13:01L
  REGION 1..12: note = CONT. FROM ABOVE: HLA-DRB1*07:01L HLA-DRB1*08:02L
  source 1..12: note = Severe acute respiratory syndrome coronavirus 2
GYLTSSSKTPEE

SEQ ID NO: 16663 - protein, 12 aa, Severe acute respiratory syndrome-related coronavirus
  REGION 1..12: note = Table B: HLA-DRB1*04:04L HLA-DPA1*02:01-B1*13:01L
  source 1..12: note = Severe acute respiratory syndrome coronavirus 2
YLTSSSKTPEEH

SEQ ID NO: 16664 - protein, 13 aa, Severe acute respiratory syndrome-related coronavirus
  REGION 1..13: note = Table B: HLA-DRB1*04:04L HLA-DRB1*08:04L HLA-DRB1*04:10L HLA-DRB1*04:08L
  source 1..13: note = Severe acute respiratory syndrome coronavirus 2
ETISLAGSYKDWS

SEQ ID NO: 16665 - protein, 11 aa, Severe acute respiratory syndrome-related coronavirus
  REGION 1..11: note = Table B: HLA-DRB1*04:04L HLA-DRB1*08:04L HLA-DPA1*01:03-B1*03:01L HLA-DRB1*11:04L HLA-DRB1*08:01L HLA-DRB1*04:10L HLA-DRB1*12:02L HLA-DRB1*14:54L HLA-DRB1*14:17L HLA-DRB1*07:01L HLA-DRB1*04:08L
  source 1..11: note = Severe acute respiratory syndrome coronavirus 2
VYYTSNPTTFH

SEQ ID NO: 16666 - protein, 12 aa, Severe acute respiratory syndrome-related coronavirus
  REGION 1..12: note = Table B: HLA-DRB1*04:04L HLA-DRB1*04:05L HLA-DQA1*01:02-B1*06:02L HLA-DRB1*01:02L HLA-DRB1*08:04L HLA-DRB1*11:04L HLA-DRB1*08:01L HLA-DRB1*11:01L HLA-DRB1*16:01L
  source 1..12: note = Severe acute respiratory syndrome coronavirus 2
TFDNLKTLLSLR

SEQ ID NO: 16667 - protein, 12 aa, Severe acute respiratory syndrome-related coronavirus
  REGION 1..12: note = Table B: HLA-DRB1*04:04L HLA-DQA1*01:02-B1*06:02L HLA-DRB1*01:02L HLA-DRB4*03:01NL HLA-DRB1*08:04L HLA-DRB1*14:01L HLA-DRB1*11:04L HLA-DRB1*08:01L HLA-DRB1*04:10L HLA-DRB1*16:01L HLA-DQA1*02:01-B1*03:03L HLA-DRB1*15:03L
  source 1..12: note = Severe acute respiratory syndrome coronavirus 2
FDNLKTLLSLRE

SEQ ID NO: 16668 - protein, 12 aa, Severe acute respiratory syndrome-related coronavirus
  REGION 1..12: note = Table B: HLA-DRB1*04:04L HLA-DRB1*08:04L HLA-DPA1*03:01-B1*04:02L HLA-DPA1*02:01-B1*13:01L
  source 1..12: note = Severe acute respiratory syndrome coronavirus 2
FTTVDNINLHTQ

SEQ ID NO: 16669 - protein, 14 aa, Severe acute respiratory syndrome-related coronavirus
  REGION 1..14: note = Table B: HLA-DRB1*04:04L HLA-DRB1*01:02L HLA-DQA1*05:05-B1*03:01L
  source 1..14: note = Severe acute respiratory syndrome coronavirus 2
HTQVVDMSMTYGQQ

SEQ ID NO: 16670 - protein, 15 aa, Severe acute respiratory syndrome-related coronavirus
  REGION 1..15: note = Table B: HLA-DRB1*04:04L HLA-DRB1*08:04L HLA-DRB1*03:01L HLA-DRB1*08:01L HLA-DRB1*11:01L HLA-DRB4*02:01NL HLA-DRB4*01:01L HLA-DPA1*01:03-B1*04:01L HLA-DRB3*01:01L HLA-DPA1*01:03-B1*104:01L HLA-DPA1*01:02-B1*04:01L
  REGION 1..15: note = CONT. FROM ABOVE: HLA-DRB1*10:01L HLA-DRB1*08:03L
  source 1..15: note = Severe acute respiratory syndrome coronavirus 2
VVDMSMTYGQQFGPT

SEQ ID NO: 16671 - protein, 14 aa, Severe acute respiratory syndrome-related coronavirus
  REGION 1..14: note = Table B: HLA-DRB1*04:04L
  source 1..14: note = Severe acute respiratory syndrome coronavirus 2
AFEYYHTTDPSFLG

SEQ ID NO: 16672 - protein, 14 aa, Severe acute respiratory syndrome-related coronavirus
  REGION 1..14: note = Table B: HLA-DRB1*04:04L HLA-DRB1*04:08L
  source 1..14: note = Severe acute respiratory syndrome coronavirus 2
YPQVNGLTSIKWAD

SEQ ID NO: 16673 - protein, 14 aa, Severe acute respiratory syndrome-related coronavirus
  REGION 1..14: note = Table B: HLA-DRB1*04:04L
  source 1..14: note = Severe acute respiratory syndrome coronavirus 2
PQVNGLTSIKWADN

SEQ ID NO: 16674 - protein, 18 aa, Severe acute respiratory syndrome-related coronavirus
  REGION 1..18: note = Table B: HLA-DRB1*04:04L HLA-DRB3*02:01L HLA-DPA1*03:01-B1*04:02L HLA-DRB1*11:02L HLA-DPA1*01:03-B1*04:01L HLA-DQA1*05:05-B1*03:116L HLA-DPA1*01:03-B1*104:01L HLA-DRB1*08:02L
  source 1..18: note = Severe acute respiratory syndrome coronavirus 2
NPPALQDAYYRARAGEAA

SEQ ID NO: 16675 - protein, 13 aa, Severe acute respiratory syndrome-related coronavirus
  REGION 1..13: note = Table B: HLA-DRB1*04:04L HLA-DPA1*01:03-B1*104:01L HLA-DRB1*07:01L
  source 1..13: note = Severe acute respiratory syndrome coronavirus 2
YRARAGEAANFCA

SEQ ID NO: 16676 - protein, 12 aa, Severe acute respiratory syndrome-related coronavirus
  REGION 1..12: note = Table B: HLA-DRB1*04:04L HLA-DPA1*02:01-B1*13:01L
  source 1..12: note = Severe acute respiratory syndrome coronavirus 2
KTVGELGDVRET

SEQ ID NO: 16677 - protein, 15 aa, Severe acute respiratory syndrome-related coronavirus
  REGION 1..15: note = Table B: HLA-DRB1*04:04L HLA-DRB1*08:04L HLA-DQA1*01:01-B1*05:01L HLA-DPA1*01:03-B1*04:01L HLA-DPA1*01:03-B1*04:02L HLA-DRB3*01:01L HLA-DRB1*07:01L
  source 1..15: note = Severe acute respiratory syndrome coronavirus 2
GDVRETMSYLFQHAN

SEQ ID NO: 16678 - protein, 15 aa, Severe acute respiratory syndrome-related coronavirus
  REGION 1..15: note = Table B: HLA-DRB1*04:04L
  source 1..15: note = Severe acute respiratory syndrome coronavirus 2
GKQATKYLVQQESPF

SEQ ID NO: 16679 - protein, 13 aa, Severe acute respiratory syndrome-related coronavirus
  REGION 1..13: note = Table B: HLA-DRB1*04:04L HLA-DRB1*08:77L HLA-DRB1*11:03L HLA-DPA1*01:03-B1*04:02L HLA-DRB3*01:01L HLA-DRB1*10:01L
  source 1..13: note = Severe acute respiratory syndrome coronavirus 2
ATKYLVQQESPFV

SEQ ID NO: 16680 - protein, 13 aa, Severe acute respiratory syndrome-related coronavirus
  REGION 1..13: note = Table B: HLA-DRB1*04:04L HLA-DRB1*08:77L HLA-DRB1*11:03L HLA-DRB1*11:04L HLA-DRB4*01:01L HLA-DRB3*01:01L HLA-DRB1*08:03L
  source 1..13: note = Severe acute respiratory syndrome coronavirus 2
TKYLVQQESPFVM

SEQ ID NO: 16681 - protein, 13 aa, Severe acute respiratory syndrome-related coronavirus
  REGION 1..13: note = Table B: HLA-DRB1*04:04L HLA-DPA1*03:01-B1*04:02L HLA-DQA1*05:05-B1*03:01L HLA-DRB1*10:01L
  source 1..13: note = Severe acute respiratory syndrome coronavirus 2
GHYKHITSKETLY

SEQ ID NO: 16682 - protein, 14 aa, Severe acute respiratory syndrome-related coronavirus
  REGION 1..14: note = Table B: HLA-DRB1*04:04L HLA-DRB1*08:04L HLA-DRB1*11:04L HLA-DRB1*08:01L HLA-DRB3*01:01L
  source 1..14: note = Severe acute respiratory syndrome coronavirus 2
KHITSKETLYCIDG

SEQ ID NO: 16683 - protein, 17 aa, Severe acute respiratory syndrome-related coronavirus
  REGION 1..17: note = Table B: HLA-DRB1*04:04L HLA-DRB3*02:01L HLA-DRB1*11:04L HLA-DRB1*07:01L HLA-DRB1*08:03L
  source 1..17: note = Severe acute respiratory syndrome coronavirus 2
IDGALLTKSSEYKGPIT

SEQ ID NO: 16684 - protein, 16 aa, Severe acute respiratory syndrome-related coronavirus
  REGION 1..16: note = Table B: HLA-DRB1*04:04L HLA-DRB3*02:01L HLA-DRB1*11:03L HLA-DRB1*14:02L HLA-DRB1*09:01L HLA-DRB3*01:01L HLA-DPA1*01:03-B1*02:01L HLA-DRB1*07:01L HLA-DRB1*08:02L
  source 1..16: note = Severe acute respiratory syndrome coronavirus 2
GPITDVFYKENSYTTT

SEQ ID NO: 16685 - protein, 11 aa, Severe acute respiratory syndrome-related coronavirus
  REGION 1..11: note = Table B: HLA-DRB1*04:04L HLA-DRB1*08:04L HLA-DRB1*04:08L
  source 1..11: note = Severe acute respiratory syndrome coronavirus 2
YTTTIKPVTYK

SEQ ID NO: 16686 - protein, 11 aa, Severe acute respiratory syndrome-related coronavirus
  REGION 1..11: note = Table B: HLA-DRB1*04:04L HLA-DRB1*01:02L HLA-DRB1*08:04L HLA-DRB3*02:01L HLA-DRB1*11:03L HLA-DRB1*11:04L HLA-DRB1*14:02L HLA-DRB1*10:01L HLA-DRB1*04:08L HLA-DRB1*08:03L HLA-DRB1*15:03L
  source 1..11: note = Severe acute respiratory syndrome coronavirus 2
IDLVPNQPYPN

SEQ ID NO: 16687 - protein, 14 aa, Severe acute respiratory syndrome-related coronavirus
  REGION 1..14: note = Table B: HLA-DRB1*04:04L HLA-DRB1*11:02L
  source 1..14: note = Severe acute respiratory syndrome coronavirus 2
LVPNQPYPNASFDN

SEQ ID NO: 16688 - protein, 15 aa, Severe acute respiratory syndrome-related coronavirus
  REGION 1..15: note = Table B: HLA-DRB1*04:04L HLA-DRB1*08:04L HLA-DRB3*02:01L HLA-DRB1*09:01L
  source 1..15: note = Severe acute respiratory syndrome coronavirus 2
VPNQPYPNASFDNFK

SEQ ID NO: 16689 - protein, 14 aa, Severe acute respiratory syndrome-related coronavirus
  REGION 1..14: note = Table B: HLA-DRB1*04:04L HLA-DRB1*11:04L HLA-DRB3*01:01L
  source 1..14: note = Severe acute respiratory syndrome coronavirus 2
SRELKVTFFPDLNG

SEQ ID NO: 16690 - protein, 14 aa, Severe acute respiratory syndrome-related coronavirus
  REGION 1..14: note = Table B: HLA-DRB1*04:04L HLA-DRB3*01:01L
  source 1..14: note = Severe acute respiratory syndrome coronavirus 2
HVNNATNKATYKPN

SEQ ID NO: 16691 - protein, 14 aa, Severe acute respiratory syndrome-related coronavirus
  REGION 1..14: note = Table B: HLA-DRB1*04:04L HLA-DPA1*01:03-B1*03:01L HLA-DRB1*14:01L HLA-DRB1*04:10L HLA-DPA1*01:03-B1*04:02L HLA-DPA1*02:01-B1*13:01L
  source 1..14: note = Severe acute respiratory syndrome coronavirus 2
TTEVVGDIILKPAN

SEQ ID NO: 16692 - protein, 11 aa, Severe acute respiratory syndrome-related coronavirus
  REGION 1..11: note = Table B: HLA-DRB1*04:04L HLA-DRB1*11:04L HLA-DRB1*04:10L HLA-DRB1*14:54L HLA-DRB1*04:08L
  source 1..11: note = Severe acute respiratory syndrome coronavirus 2
IILKPANNSLK

SEQ ID NO: 16693 - protein, 17 aa, Severe acute respiratory syndrome-related coronavirus
  REGION 1..17: note = Table B: HLA-DRB1*04:04L
  source 1..17: note = Severe acute respiratory syndrome coronavirus 2
ITEEVGHTDLMAAYVDN

SEQ ID NO: 16694 - protein, 12 aa, Severe acute respiratory syndrome-related coronavirus
  REGION 1..12: note = Table B: HLA-DRB1*04:04L HLA-DQA1*01:02-B1*06:02L HLA-DRB1*01:02L HLA-DRB1*12:01L HLA-DPA1*03:01-B1*105:01L HLA-DQA1*01:03-B1*06:01L HLA-DRB1*04:08L
  source 1..12: note = Severe acute respiratory syndrome coronavirus 2
LMAAYVDNSSLT

SEQ ID NO: 16695 - protein, 12 aa, Severe acute respiratory syndrome-related coronavirus
  REGION 1..12: note = Table B: HLA-DRB1*04:04L HLA-DQA1*01:02-B1*06:02L HLA-DRB1*08:01L HLA-DRB1*04:10L HLA-DPA1*02:01-B1*13:01L HLA-DRB1*08:03L
  source 1..12: note = Severe acute respiratory syndrome coronavirus 2
YVDNSSLTIKKP

SEQ ID NO: 16696 - protein, 14 aa, Severe acute respiratory syndrome-related coronavirus
  REGION 1..14: note = Table B: HLA-DRB1*04:04L HLA-DRB1*03:01L HLA-DRB1*11:03L HLA-DRB1*11:01L HLA-DRB1*13:01L
  source 1..14: note = Severe acute respiratory syndrome coronavirus 2
NSSLTIKKPNELSR

SEQ ID NO: 16697 - protein, 13 aa, Severe acute respiratory syndrome-related coronavirus
  REGION 1..13: note = Table B: HLA-DRB1*04:04L HLA-DQA1*01:02-B1*06:02L HLA-DRB1*11:04L HLA-DRB1*08:01L HLA-DRB1*04:10L HLA-DQA1*03:01-B1*03:02L HLA-DQA1*02:01-B1*03:03L HLA-DRB1*15:03L
  source 1..13: note = Severe acute respiratory syndrome coronavirus 2
LSRVLGLKTLATH

SEQ ID NO: 16698 - protein, 14 aa, Severe acute respiratory syndrome-related coronavirus
  REGION 1..14: note = Table B: HLA-DRB1*04:04L
  source 1..14: note = Severe acute respiratory syndrome coronavirus 2
SVPWDTIANYAKPF

SEQ ID NO: 16699 - protein, 13 aa, Severe acute respiratory syndrome-related coronavirus
  REGION 1..13: note = Table B: HLA-DRB1*04:04L HLA-DRB1*11:03L HLA-DRB1*11:04L HLA-DRB1*11:01L HLA-DRB1*04:10L HLA-DRB3*01:01L HLA-DRB1*07:01L HLA-DRB1*08:03L
  source 1..13: note = Severe acute respiratory syndrome coronavirus 2
DTIANYAKPFLNK

SEQ ID NO: 16700 - protein, 13 aa, Severe acute respiratory syndrome-related coronavirus
  REGION 1..13: note = Table B: HLA-DRB1*04:04L HLA-DRB1*01:01L HLA-DRB1*08:77L HLA-DPA1*01:03-B1*03:01L HLA-DRB1*11:03L HLA-DRB1*11:04L HLA-DRB1*12:02L HLA-DRB3*01:01L HLA-DPA1*03:01-B1*105:01L HLA-DRB1*14:54L HLA-DRB1*10:01L
  source 1..13: note = Severe acute respiratory syndrome coronavirus 2
SRIKASMPTTIAK

SEQ ID NO: 16701 - protein, 15 aa, Severe acute respiratory syndrome-related coronavirus
  REGION 1..15: note = Table B: HLA-DRB1*04:04L
  source 1..15: note = Severe acute respiratory syndrome coronavirus 2
IKASMPTTIAKNTVK

SEQ ID NO: 16702 - protein, 15 aa, Severe acute respiratory syndrome-related coronavirus
  REGION 1..15: note = Table B: HLA-DRB1*04:04L HLA-DRB1*03:01L HLA-DRB1*11:01L HLA-DRB1*13:01L
  source 1..15: note = Severe acute respiratory syndrome coronavirus 2
MPTTIAKNTVKSVGK

SEQ ID NO: 16703 - protein, 14 aa, Severe acute respiratory syndrome-related coronavirus
  REGION 1..14: note = Table B: HLA-DRB1*04:04L HLA-DRB1*01:02L HLA-DRB1*15:03L
  source 1..14: note = Severe acute respiratory syndrome coronavirus 2
TAALGVLMSNLGMP

SEQ ID NO: 16704 - protein, 13 aa, Severe acute respiratory syndrome-related coronavirus
  REGION 1..13: note = Table B: HLA-DRB1*04:04L HLA-DRB1*08:04L HLA-DRB1*08:01L HLA-DRB1*11:01L HLA-DRB5*01:01L HLA-DRB4*01:01L HLA-DRB1*04:10L HLA-DPA1*01:03-B1*04:02L HLA-DRB3*01:01L HLA-DRB1*10:01L
  source 1..13: note = Severe acute respiratory syndrome coronavirus 2
REGYLNSTNVTIA

SEQ ID NO: 16705 - protein, 13 aa, Severe acute respiratory syndrome-related coronavirus
  REGION 1..13: note = Table B: HLA-DRB1*04:04L HLA-DQA1*01:02-B1*06:02L HLA-DRB1*01:02L HLA-DRB1*12:01L HLA-DPA1*03:01-B1*105:01L HLA-DQA1*05:05-B1*03:01L HLA-DRB1*10:01L HLA-DRB1*04:08L
  source 1..13: note = Severe acute respiratory syndrome coronavirus 2
LSGLDSLDTYPSL

SEQ ID NO: 16706 - protein, 14 aa, Severe acute respiratory syndrome-related coronavirus
  REGION 1..14: note = Table B: HLA-DRB1*04:04L
  source 1..14: note = Severe acute respiratory syndrome coronavirus 2
IINLVQMAPISAMV

SEQ ID NO: 16707 - protein, 12 aa, Severe acute respiratory syndrome-related coronavirus
  REGION 1..12: note = Table B: HLA-DRB1*04:04L HLA-DRB1*04:05L HLA-DPA1*01:03-B1*03:01L HLA-DRB1*04:10L HLA-DRB1*14:54L HLA-DRB1*10:01L HLA-DRB1*04:08L
  source 1..12: note = Severe acute respiratory syndrome coronavirus 2
LVQMAPISAMVR

SEQ ID NO: 16708 - protein, 15 aa, Severe acute respiratory syndrome-related coronavirus
  REGION 1..15: note = Table B: HLA-DRB1*04:04L HLA-DRB3*02:01L HLA-DQA1*05:05-B1*03:116L HLA-DRB1*10:01L HLA-DRB1*15:01L
  source 1..15: note = Severe acute respiratory syndrome coronavirus 2
ASFYYVWKSYVHVVD

SEQ ID NO: 16709 - protein, 16 aa, Severe acute respiratory syndrome-related coronavirus
  REGION 1..16: note = Table B: HLA-DRB1*04:04L HLA-DRB1*15:01L
  source 1..16: note = Severe acute respiratory syndrome coronavirus 2
ISDEVARDLSLQFKRP

SEQ ID NO: 16710 - protein, 14 aa, Severe acute respiratory syndrome-related coronavirus
  REGION 1..14: note = Table B: HLA-DRB1*04:04L HLA-DRB1*08:01L HLA-DPA1*01:03-B1*04:01L HLA-DPA1*01:03-B1*04:02L HLA-DRB1*07:01L
  source 1..14: note = Severe acute respiratory syndrome coronavirus 2
DQSSYIVDSVTVKN

SEQ ID NO: 16711 - protein, 12 aa, Severe acute respiratory syndrome-related coronavirus
  REGION 1..12: note = Table B: HLA-DRB1*04:04L HLA-DRB1*04:05L HLA-DQA1*01:02-B1*06:02L HLA-DRB1*14:01L HLA-DRB1*08:01L HLA-DRB1*12:01L HLA-DQA1*02:01-B1*03:03L HLA-DRB1*15:01L
  source 1..12: note = Severe acute respiratory syndrome coronavirus 2
SIHLYFDKAGQK

SEQ ID NO: 16712 - protein, 12 aa, Severe acute respiratory syndrome-related coronavirus
  REGION 1..12: note = Table B: HLA-DRB1*04:04L HLA-DRB1*01:02L HLA-DRB1*08:01L HLA-DRB1*12:01L
  source 1..12: note = Severe acute respiratory syndrome coronavirus 2
LSHFVNLDNLRA

SEQ ID NO: 16713 - protein, 14 aa, Severe acute respiratory syndrome-related coronavirus
  REGION 1..14: note = Table B: HLA-DRB1*04:04L HLA-DRB1*04:05L HLA-DRB1*01:02L HLA-DRB1*08:04L HLA-DRB3*02:01L HLA-DQA1*01:01-B1*05:01L HLA-DRB1*08:01L HLA-DRB1*04:10L HLA-DRB1*04:08L
  source 1..14: note = Severe acute respiratory syndrome coronavirus 2
SAEVAVKMFDAYVN

SEQ ID NO: 16714 - protein, 14 aa, Severe acute respiratory syndrome-related coronavirus
  REGION 1..14: note = Table B: HLA-DRB1*04:04L HLA-DRB1*08:04L HLA-DRB3*02:01L HLA-DRB1*11:02L HLA-DRB1*11:04L HLA-DRB1*04:10L HLA-DQA1*05:05-B1*03:01L HLA-DRB1*04:08L HLA-DRB1*15:01L
  source 1..14: note = Severe acute respiratory syndrome coronavirus 2
VKMFDAYVNTFSST

SEQ ID NO: 16715 - protein, 11 aa, Severe acute respiratory syndrome-related coronavirus
  REGION 1..11: note = Table B: HLA-DRB1*04:04L HLA-DRB1*04:05L HLA-DQA1*01:02-B1*06:02L HLA-DRB1*01:02L HLA-DRB3*02:01L HLA-DPA1*01:03-B1*03:01L HLA-DRB1*14:01L HLA-DRB1*11:04L HLA-DQA1*05:05-B1*03:19L HLA-DRB1*04:10L
  REGION 1..11: note = CONT. FROM ABOVE: HLA-DPA1*01:03-B1*04:02L HLA-DRB1*14:54L HLA-D PA1*01:02-B1*04:01L HLA-DRB1*04:08L HLA-DRB1*15:03L
  source 1..11: note = Severe acute respiratory syndrome coronavirus 2
FSSTFNVPMEK

SEQ ID NO: 16716 - protein, 14 aa, Severe acute respiratory syndrome-related coronavirus
  REGION 1..14: note = Table B: HLA-DRB1*04:04L HLA-DRB1*01:01L HLA-DRB1*11:03L HLA-DRB1*11:04L HLA-DPA1*01:03-B1*04:01L HLA-DRB1*09:01L HLA-DPA1*01:03-B1*104:01L HLA-DRB1*10:01L HLA-DRB1*08:03L
  source 1..14: note = Severe acute respiratory syndrome coronavirus 2
LKTLVATAEAELAK

SEQ ID NO: 16717 - protein, 14 aa, Severe acute respiratory syndrome-related coronavirus
  REGION 1..14: note = Table B: HLA-DRB1*04:04L HLA-DRB1*03:01L HLA-DRB1*11:03L HLA-DRB1*11:04L HLA-DRB1*14:02L HLA-DRB1*08:01L HLA-DRB1*12:02L HLA-DRB3*01:01L HLA-DRB1*08:03L
  source 1..14: note = Severe acute respiratory syndrome coronavirus 2
AELAKNVSLDNVLS

SEQ ID NO: 16718 - protein, 16 aa, Severe acute respiratory syndrome-related coronavirus
  REGION 1..16: note = Table B: HLA-DRB1*04:04L HLA-DRB3*01:01L HLA-DRB1*07:01L
  source 1..16: note = Severe acute respiratory syndrome coronavirus 2
ISAARQGFVDSDVETK

SEQ ID NO: 16719 - protein, 13 aa, Severe acute respiratory syndrome-related coronavirus
  REGION 1..13: note = Table B: HLA-DRB1*04:04L HLA-DRB1*14:01L HLA-DPA1*02:01-B1*13:01L
  source 1..13: note = Severe acute respiratory syndrome coronavirus 2
ARHINAQVAKSHN

SEQ ID NO: 16720 - protein, 16 aa, Severe acute respiratory syndrome-related coronavirus
  REGION 1..16: note = Table B: HLA-DRB1*04:04L
  source 1..16: note = Severe acute respiratory syndrome coronavirus 2
LRKQIRSAAKKNNLPF

SEQ ID NO: 16721 - protein, 13 aa, Severe acute respiratory syndrome-related coronavirus
  REGION 1..13: note = Table B: HLA-DRB1*04:04L HLA-DRB1*04:05L HLA-DQA1*01:02-B1*06:02L HLA-DRB1*01:02L HLA-DPA1*01:03-B1*03:01L HLA-DPA1*02:01-B1*13:01L HLA-DRB1*16:01L
  source 1..13: note = Severe acute respiratory syndrome coronavirus 2
ATTRQVVNVVTTK

SEQ ID NO: 16722 - protein, 14 aa, Severe acute respiratory syndrome-related coronavirus
  REGION 1..14: note = Table B: HLA-DRB1*04:04L HLA-DRB3*02:01L HLA-DPA1*01:03-B1*03:01L HLA-DRB1*03:01L HLA-DRB1*11:02L HLA-DQA1*01-B1*05L HLA-DQA1*05:01-B1*02:01L HLA-DPA1*01:03-B1*04:01L HLA-DPA1*01:03-B1*04:02L
  REGION 1..14: note = CONT. FROM ABOVE: HLA-DPA1*01:03-B1*104:01L HLA-DRB1*07:01L HLA- DRB1*08:03L
  source 1..14: note = Severe acute respiratory syndrome coronavirus 2
GGKIVNNWLKQLIK

SEQ ID NO: 16723 - protein, 14 aa, Severe acute respiratory syndrome-related coronavirus
  REGION 1..14: note = Table B: HLA-DRB1*04:04L HLA-DPA1*03:01-B1*04:02L HLA-DRB1*14:02L HLA-DQA1*05:05-B1*03:19L HLA-DRB1*13:01L HLA-DPA1*01:03-B1*04:02L HLA-DPA1*03:01-B1*105:01L HLA-DPA1*01:03-B1*02:01L HLA-DPA1*01:03-B1*104:01L
  REGION 1..14: note = CONT. FROM ABOVE: HLA-DQA1*05:05-B1*03:01L HLA-DRB1*07:01L
  source 1..14: note = Severe acute respiratory syndrome coronavirus 2
ITPVHVMSKHTDFS

SEQ ID NO: 16724 - protein, 12 aa, Severe acute respiratory syndrome-related coronavirus
  REGION 1..12: note = Table B: HLA-DRB1*04:04L HLA-DQA1*01:02-B1*06:02L HLA-DRB1*03:01L HLA-DRB1*11:03L HLA-DRB1*11:04L HLA-DRB1*14:02L HLA-DRB1*08:01L HLA-DRB1*11:01L HLA-DRB5*01:01L HLA-DQA1*05:05-B1*03:19L HLA-DRB4*01:01L HLA-DRB1*04:10L
  REGION 1..12: note = CONT. FROM ABOVE: HLA-DRB1*09:01L HLA-DPA1*01:03-B1*04:02L HLA-D PA1*02:01-B1*13:01L HLA-DQA1*05:05-B1*03:01L HLA-DRB1*10:01L HLA -DQA1*01:03-B1*06:01L HLA-DRB1*08:03L
  source 1..12: note = Severe acute respiratory syndrome coronavirus 2
GGSYTNDKACPL

SEQ ID NO: 16725 - protein, 12 aa, Severe acute respiratory syndrome-related coronavirus
  REGION 1..12: note = Table B: HLA-DRB1*04:04L HLA-DPA1*02:01-B1*13:01L HLA-DPA1*01:03-B1*104:01L
  source 1..12: note = Severe acute respiratory syndrome coronavirus 2
PLIAAVITREVG

SEQ ID NO: 16726 - protein, 14 aa, Severe acute respiratory syndrome-related coronavirus
  REGION 1..14: note = Table B: HLA-DRB1*04:04L HLA-DRB1*11:04L HLA-DRB4*01:01L HLA-DPA1*01:03-B1*04:02L HLA-DRB3*01:01L HLA-DPA1*01:03-B1*104:01L HLA-DRB1*10:01L HLA-DRB1*08:03L
  source 1..14: note = Severe acute respiratory syndrome coronavirus 2
LPGTILRTTNGDFL

SEQ ID NO: 16727 - protein, 13 aa, Severe acute respiratory syndrome-related coronavirus
  REGION 1..13: note = Table B: HLA-DRB1*04:04L HLA-DQA1*01:02-B1*06:02L HLA-DRB3*02:01L HLA-DRB1*14:01L HLA-DRB1*08:01L HLA-DQA1*03:01-B1*03:02L HLA-DRB1*15:01L
  source 1..13: note = Severe acute respiratory syndrome coronavirus 2
PSKLIEYTDFATS

SEQ ID NO: 16728 - protein, 16 aa, Severe acute respiratory syndrome-related coronavirus
  REGION 1..16: note = Table B: HLA-DRB1*04:04L
  source 1..16: note = Severe acute respiratory syndrome coronavirus 2
AAECTIFKDASGKPVP

SEQ ID NO: 16729 - protein, 14 aa, Severe acute respiratory syndrome-related coronavirus
  REGION 1..14: note = Table B: HLA-DRB1*04:04L HLA-DRB1*04:05L HLA-DPA1*01:03-B1*03:01L HLA-DQA1*01:01-B1*05:01L HLA-DRB1*08:01L HLA-DRB1*12:01L HLA-DRB1*14:17L HLA-DRB1*16:01L HLA-DRB1*15:03L
  source 1..14: note = Severe acute respiratory syndrome coronavirus 2
NVLEGSVAYESLRP

SEQ ID NO: 16730 - protein, 12 aa, Severe acute respiratory syndrome-related coronavirus
  REGION 1..12: note = Table B: HLA-DRB1*04:04L HLA-DRB1*14:01L HLA-DRB1*04:10L HLA-DPA1*02:01-B1*13:01L HLA-DRB1*14:54L HLA-DRB1*15:03L
  source 1..12: note = Severe acute respiratory syndrome coronavirus 2
SVAYESLRPDTR

SEQ ID NO: 16731 - protein, 13 aa, Severe acute respiratory syndrome-related coronavirus
  REGION 1..13: note = Table B: HLA-DRB1*04:04L HLA-DRB1*04:05L HLA-DRB1*04:08L
  source 1..13: note = Severe acute respiratory syndrome coronavirus 2
VRVVTTFDSEYCR

SEQ ID NO: 16732 - protein, 13 aa, Severe acute respiratory syndrome-related coronavirus
  REGION 1..13: note = Table B: HLA-DRB1*04:04L HLA-DRB1*04:05L
  source 1..13: note = Severe acute respiratory syndrome coronavirus 2
RVVTTFDSEYCRH

SEQ ID NO: 16733 - protein, 14 aa, Severe acute respiratory syndrome-related coronavirus
  REGION 1..14: note = Table B: HLA-DRB1*04:04L HLA-DRB1*04:05L HLA-DQA1*05:05-B1*03:01L
  source 1..14: note = Severe acute respiratory syndrome coronavirus 2
VDAVNLLTNMFTPL

SEQ ID NO: 16734 - protein, 12 aa, Severe acute respiratory syndrome-related coronavirus
  REGION 1..12: note = Table B: HLA-DRB1*04:04L HLA-DRB1*01:01L HLA-DRB1*08:04L HLA-DRB1*11:02L HLA-DRB1*11:03L HLA-DRB1*11:04L HLA-DRB1*11:01L HLA-DRB5*02:02L HLA-DRB4*01:01L HLA-DRB1*04:10L HLA-DRB1*12:02L HLA-DRB3*01:01L
  source 1..12: note = Severe acute respiratory syndrome coronavirus 2
GEYSHVVAFNTL

SEQ ID NO: 16735 - protein, 14 aa, Severe acute respiratory syndrome-related coronavirus
  REGION 1..14: note = Table B: HLA-DRB1*04:04L HLA-DRB3*01:01L
  source 1..14: note = Severe acute respiratory syndrome coronavirus 2
RRVVFNGVSFSTFE

SEQ ID NO: 16736 - protein, 13 aa, Severe acute respiratory syndrome-related coronavirus
  REGION 1..13: note = Table B: HLA-DRB1*04:04L HLA-DRB1*11:04L HLA-DRB3*01:01L
  source 1..13: note = Severe acute respiratory syndrome coronavirus 2
SDVLLPLTQYNRY

SEQ ID NO: 16737 - protein, 15 aa, Severe acute respiratory syndrome-related coronavirus
  REGION 1..15: note = Table B: HLA-DRB1*04:04L HLA-DQA1*03:01-B1*03:02L HLA-DRB1*07:01L
  source 1..15: note = Severe acute respiratory syndrome coronavirus 2
LPLTQYNRYLALYNK

SEQ ID NO: 16738 - protein, 15 aa, Severe acute respiratory syndrome-related coronavirus
  REGION 1..15: note = Table B: HLA-DRB1*04:04L HLA-DRB3*02:01L HLA-DRB1*14:54L HLA-DPA1*01:03-B1*02:01L HLA-DQA1*05:05-B1*03:01L HLA-DRB1*08:02L
  source 1..15: note = Severe acute respiratory syndrome coronavirus 2
NRYLALYNKYKYFSG

SEQ ID NO: 16739 - protein, 14 aa, Severe acute respiratory syndrome-related coronavirus
  REGION 1..14: note = Table B: HLA-DRB1*04:04L HLA-DQA1*01:02-B1*06:02L HLA-DRB1*08:04L HLA-DRB1*11:04L HLA-DRB3*01:01L HLA-DRB1*15:03L
  source 1..14: note = Severe acute respiratory syndrome coronavirus 2
QSGFRKMAFPSGKV

SEQ ID NO: 16740 - protein, 14 aa, Severe acute respiratory syndrome-related coronavirus
  REGION 1..14: note = Table B: HLA-DRB1*04:04L HLA-DRB1*04:08L
  source 1..14: note = Severe acute respiratory syndrome coronavirus 2
RHVICTSEDMLNPN

SEQ ID NO: 16741 - protein, 14 aa, Severe acute respiratory syndrome-related coronavirus
  REGION 1..14: note = Table B: HLA-DRB1*04:04L HLA-DRB1*11:01L
  source 1..14: note = Severe acute respiratory syndrome coronavirus 2
YEDLLIRKSNHNFL

SEQ ID NO: 16742 - protein, 13 aa, Severe acute respiratory syndrome-related coronavirus
  REGION 1..13: note = Table B: HLA-DRB1*04:04L HLA-DRB1*11:04L HLA-DRB1*11:01L HLA-DPA1*02:01-B1*13:01L HLA-DPA1*01:03-B1*02:01L HLA-DRB1*10:01L
  source 1..13: note = Severe acute respiratory syndrome coronavirus 2
PKYKFVRIQPGQT

SEQ ID NO: 16743 - protein, 11 aa, Severe acute respiratory syndrome-related coronavirus
  REGION 1..11: note = Table B: HLA-DRB1*04:04L HLA-DRB1*04:08L
  source 1..11: note = Severe acute respiratory syndrome coronavirus 2
FVRIQPGQTFS

SEQ ID NO: 16744 - protein, 14 aa, Severe acute respiratory syndrome-related coronavirus
  REGION 1..14: note = Table B: HLA-DRB1*04:04L HLA-DRB1*08:04L HLA-DRB1*08:77L HLA-DRB1*11:03L HLA-DRB1*11:04L HLA-DRB1*14:02L HLA-DRB1*11:01L HLA-DQA1*05:05-B1*03:116L HLA-DRB1*12:02L HLA-DRB3*01:01L HLA-DRB1*07:01L HLA-DRB1*10:01L HLA-DRB1*08:03L HLA-DRB1*15:03L
  source 1..14: note = Severe acute respiratory syndrome coronavirus 2
VDRQTAQAAGTDTT

SEQ ID NO: 16745 - protein, 14 aa, Severe acute respiratory syndrome-related coronavirus
  REGION 1..14: note = Table B: HLA-DRB1*04:04L HLA-DRB1*10:01L
  source 1..14: note = Severe acute respiratory syndrome coronavirus 2
LNRFTTTLNDFNLV

SEQ ID NO: 16746 - protein, 14 aa, Severe acute respiratory syndrome-related coronavirus
  REGION 1..14: note = Table B: HLA-DRB1*04:04L HLA-DRB1*11:01L HLA-DRB3*01:01L
  source 1..14: note = Severe acute respiratory syndrome coronavirus 2
MKYNYEPLTQDHVD

SEQ ID NO: 16747 - protein, 13 aa, Severe acute respiratory syndrome-related coronavirus
  REGION 1..13: note = Table B: HLA-DRB1*04:04L HLA-DRB1*04:05L HLA-DQA1*01:02-B1*06:02L HLA-DRB1*04:10L HLA-DRB1*15:03L
  source 1..13: note = Severe acute respiratory syndrome coronavirus 2
QDHVDILGPLSAQ

SEQ ID NO: 16748 - protein, 14 aa, Severe acute respiratory syndrome-related coronavirus
  REGION 1..14: note = Table B: HLA-DRB1*04:04L
  source 1..14: note = Severe acute respiratory syndrome coronavirus 2
QTGIAVLDMCASLK

SEQ ID NO: 16749 - protein, 13 aa, Severe acute respiratory syndrome-related coronavirus
  REGION 1..13: note = Table B: HLA-DRB1*04:04L HLA-DRB1*11:04L
  source 1..13: note = Severe acute respiratory syndrome coronavirus 2
MSAFAMMFVKHKH

SEQ ID NO: 16750 - protein, 14 aa, Severe acute respiratory syndrome-related coronavirus
  REGION 1..14: note = Table B: HLA-DRB1*04:04L HLA-DRB1*01:02L HLA-DPA1*01:03-B1*04:02L HLA-DPA1*02:01-B1*13:01L
  source 1..14: note = Severe acute respiratory syndrome coronavirus 2
VMRIMTWLDMVDTS

SEQ ID NO: 16751 - protein, 13 aa, Severe acute respiratory syndrome-related coronavirus
  REGION 1..13: note = Table B: HLA-DRB1*04:04L
  source 1..13: note = Severe acute respiratory syndrome coronavirus 2
MTWLDMVDTSLSG

SEQ ID NO: 16752 - protein, 12 aa, Severe acute respiratory syndrome-related coronavirus
  REGION 1..12: note = Table B: HLA-DRB1*04:04L HLA-DRB1*04:05L HLA-DRB1*01:02L HLA-DPA1*01:03-B1*03:01L HLA-DRB1*04:10L HLA-DRB1*04:08L
  source 1..12: note = Severe acute respiratory syndrome coronavirus 2
LDMVDTSLSGFK

SEQ ID NO: 16753 - protein, 16 aa, Severe acute respiratory syndrome-related coronavirus
  REGION 1..16: note = Table B: HLA-DRB1*04:04L HLA-DRB1*08:04L HLA-DRB1*11:04L HLA-DRB3*01:01L
  source 1..16: note = Severe acute respiratory syndrome coronavirus 2
ARRVWTLMNVLTLVYK

SEQ ID NO: 16754 - protein, 15 aa, Severe acute respiratory syndrome-related coronavirus
  REGION 1..15: note = Table B: HLA-DRB1*04:04L HLA-DPA1*03:01-B1*04:02L HLA-DPA1*01:03-B1*04:02L HLA-DPA1*02:01-B1*13:01L HLA-DPA1*01:03-B1*02:01L
  source 1..15: note = Severe acute respiratory syndrome coronavirus 2
AFKLNIKLLGVGGKP

SEQ ID NO: 16755 - protein, 15 aa, Severe acute respiratory syndrome-related coronavirus
  REGION 1..15: note = Table B: HLA-DRB1*04:04L HLA-DRB1*08:01L HLA-DRB1*11:01L HLA-DQA1*03:01-B1*03:02L HLA-DPA1*01:03-B1*104:01L HLA-DPA1*01:02-B1*04:01L HLA-DRB1*07:01L HLA-DQA1*01:03-B1*06:01L HLA-DQA1*02:01-B1*03:03L
  REGION 1..15: note = CONT. FROM ABOVE: HLA-DRB1*15:03L
  source 1..15: note = Severe acute respiratory syndrome coronavirus 2
VGGKPCIKVATVQSK

SEQ ID NO: 16756 - protein, 12 aa, Severe acute respiratory syndrome-related coronavirus
  REGION 1..12: note = Table B: HLA-DRB1*04:04L HLA-DRB1*04:05L HLA-DRB1*01:02L HLA-DPA1*01:03-B1*03:01L HLA-DQA1*01-B1*05L HLA-DRB1*04:10L HLA-DPA1*02:01-B1*13:01L HLA-DRB1*14:54L HLA-DRB1*04:08L HLA-DRB1*15:03L
  source 1..12: note = Severe acute respiratory syndrome coronavirus 2
VATVQSKMSDVK

SEQ ID NO: 16757 - protein, 14 aa, Severe acute respiratory syndrome-related coronavirus
  REGION 1..14: note = Table B: HLA-DRB1*04:04L HLA-DQA1*05:05-B1*03:01L HLA-DPA1*01:02-B1*04:01L HLA-DRB1*07:01L HLA-DRB1*15:03L
  source 1..14: note = Severe acute respiratory syndrome coronavirus 2
SSSKLWAQCVQLHN

SEQ ID NO: 16758 - protein, 15 aa, Severe acute respiratory syndrome-related coronavirus
  REGION 1..15: note = Table B: HLA-DRB1*04:04L HLA-DRB1*01:02L HLA-DPA1*03:01-B1*105:01L HLA-DQA1*05:05-B1*03:01L HLA-DRB1*04:08L
  source 1..15: note = Severe acute respiratory syndrome coronavirus 2
VSLLSVLLSMQGAVD

SEQ ID NO: 16759 - protein, 14 aa, Severe acute respiratory syndrome-related coronavirus
  REGION 1..14: note = Table B: HLA-DRB1*04:04L HLA-DRB1*10:01L HLA-DRB1*04:08L
  source 1..14: note = Severe acute respiratory syndrome coronavirus 2
LSVLLSMQGAVDIN

SEQ ID NO: 16760 - protein, 14 aa, Severe acute respiratory syndrome-related coronavirus
  REGION 1..14: note = Table B: HLA-DRB1*04:04L HLA-DRB4*03:01NL HLA-DRB3*02:01L HLA-DRB1*08:01L HLA-DRB1*12:02L HLA-DRB1*07:01L HLA-DRB1*04:08L
  source 1..14: note = Severe acute respiratory syndrome coronavirus 2
DNRATLQAIASEFS

SEQ ID NO: 16761 - protein, 13 aa, Severe acute respiratory syndrome-related coronavirus
  REGION 1..13: note = Table B: HLA-DRB1*04:04L HLA-DRB1*01:02L HLA-DRB4*03:01NL HLA-DRB1*11:04L HLA-DRB1*12:02L HLA-DQA1*05:05-B1*03:01L HLA-DRB1*04:08L HLA-DRB1*08:03L
  source 1..13: note = Severe acute respiratory syndrome coronavirus 2
RATLQAIASEFSS

SEQ ID NO: 16762 - protein, 15 aa, Severe acute respiratory syndrome-related coronavirus
  REGION 1..15: note = Table B: HLA-DRB1*04:04L HLA-DRB1*04:08L
  source 1..15: note = Severe acute respiratory syndrome coronavirus 2
ATLQAIASEFSSLPS

SEQ ID NO: 16763 - protein, 14 aa, Severe acute respiratory syndrome-related coronavirus
  REGION 1..14: note = Table B: HLA-DRB1*04:04L HLA-DRB1*08:04L HLA-DRB1*11:03L HLA-DRB1*11:01L HLA-DQA1*05:05-B1*03:116L HLA-DRB1*09:01L HLA-DRB3*01:01L HLA-DPA1*01:03-B1*104:01L
  source 1..14: note = Severe acute respiratory syndrome coronavirus 2
EQAVANGDSEVVLK

SEQ ID NO: 16764 - protein, 12 aa, Severe acute respiratory syndrome-related coronavirus
  REGION 1..12: note = Table B: HLA-DRB1*04:04L HLA-DRB1*04:05L HLA-DRB1*01:02L HLA-DRB1*12:01L HLA-DPA1*02:01-B1*13:01L HLA-DRB1*16:01L HLA-DRB1*04:08L
  source 1..12: note = Severe acute respiratory syndrome coronavirus 2
KKLKKSLNVAKS

SEQ ID NO: 16765 - protein, 12 aa, Severe acute respiratory syndrome-related coronavirus
  REGION 1..12: note = Table B: HLA-DRB1*04:04L HLA-DRB1*04:05L HLA-DRB1*01:02L HLA-DRB1*12:01L HLA-DPA1*02:01-B1*13:01L HLA-DRB1*16:01L HLA-DRB1*04:08L
  source 1..12: note = Severe acute respiratory syndrome coronavirus 2
KLKKSLNVAKSE

SEQ ID NO: 16766 - protein, 13 aa, Severe acute respiratory syndrome-related coronavirus
  REGION 1..13: note = Table B: HLA-DRB1*04:04L HLA-DRB1*01:02L HLA-DRB1*12:01L
  source 1..13: note = Severe acute respiratory syndrome coronavirus 2
KKSLNVAKSEFDR

SEQ ID NO: 16767 - protein, 13 aa, Severe acute respiratory syndrome-related coronavirus
  REGION 1..13: note = Table B: HLA-DRB1*04:04L HLA-DRB1*01:02L HLA-DRB1*12:01L
  source 1..13: note = Severe acute respiratory syndrome coronavirus 2
KSLNVAKSEFDRD

SEQ ID NO: 16768 - protein, 14 aa, Severe acute respiratory syndrome-related coronavirus
  REGION 1..14: note = Table B: HLA-DRB1*04:04L HLA-DRB1*08:04L HLA-DRB1*08:77L HLA-DRB3*02:01L HLA-DRB1*03:01L HLA-DRB1*11:03L HLA-DRB1*11:04L HLA-DRB1*11:01L HLA-DPA1*01:03-B1*04:01L HLA-DRB1*04:10L HLA-DPA1*01:03-B1*04:02L HLA-DRB1*14:54L HLA-DRB1*07:01L
  source 1..14: note = Severe acute respiratory syndrome coronavirus 2
LRKLDNDALNNIIN

SEQ ID NO: 16769 - protein, 14 aa, Severe acute respiratory syndrome-related coronavirus
  REGION 1..14: note = Table B: HLA-DRB1*04:04L HLA-DRB1*03:01L HLA-DRB1*04:10L HLA-DPA1*01:03-B1*04:02L
  source 1..14: note = Severe acute respiratory syndrome coronavirus 2
RKLDNDALNNIINN

SEQ ID NO: 16770 - protein, 12 aa, Severe acute respiratory syndrome-related coronavirus
  REGION 1..12: note = Table B: HLA-DRB1*04:04L HLA-DRB1*04:05L HLA-DQA1*01:02-B1*06:02L HLA-DRB1*01:02L HLA-DQA1*05:01-B1*02:01L HLA-DRB1*04:10L HLA-DRB1*14:54L HLA-DRB1*16:01L HLA-DRB1*04:08L
  source 1..12: note = Severe acute respiratory syndrome coronavirus 2
DALNNIINNARD

SEQ ID NO: 16771 - protein, 12 aa, Severe acute respiratory syndrome-related coronavirus
  REGION 1..12: note = Table B: HLA-DRB1*04:04L HLA-DRB1*01:02L HLA-DRB1*14:01L HLA-DQA1*05:05-B1*03:19L HLA-DPA1*03:01-B1*105:01L HLA-DRB1*08:03L HLA-DRB1*15:03L
  source 1..12: note = Severe acute respiratory syndrome coronavirus 2
ALNNIINNARDG

SEQ ID NO: 16772 - protein, 12 aa, Severe acute respiratory syndrome-related coronavirus
  REGION 1..12: note = Table B: HLA-DRB1*04:04L HLA-DRB1*04:10L HLA-DRB1*04:08L
  source 1..12: note = Severe acute respiratory syndrome coronavirus 2
NIIPLTTAAKLM

SEQ ID NO: 16773 - protein, 16 aa, Severe acute respiratory syndrome-related coronavirus
  REGION 1..16: note = Table B: HLA-DRB1*04:04L HLA-DRB1*11:02L HLA-DRB1*11:03L HLA-DRB1*11:04L HLA-DRB1*11:01L HLA-DRB1*12:02L HLA-DRB3*01:01L HLA-DPA1*01:03-B1*02:01L HLA-DRB1*08:02L HLA-DRB1*08:03L
  source 1..16: note = Severe acute respiratory syndrome coronavirus 2
IIPLTTAAKLMVVIPD

SEQ ID NO: 16774 - protein, 13 aa, Severe acute respiratory syndrome-related coronavirus
  REGION 1..13: note = Table B: HLA-DRB1*04:04L HLA-DRB1*08:04L HLA-DRB1*12:02L HLA-DRB1*14:54L HLA-DRB1*04:08L
  source 1..13: note = Severe acute respiratory syndrome coronavirus 2
AKLMVVIPDYNTY

SEQ ID NO: 16775 - protein, 11 aa, Severe acute respiratory syndrome-related coronavirus
  REGION 1..11: note = Table B: HLA-DRB1*04:04L HLA-DRB1*01:02L HLA-DRB1*04:10L HLA-DRB1*04:08L
  source 1..11: note = Severe acute respiratory syndrome coronavirus 2
MVVIPDYNTYK

SEQ ID NO: 16776 - protein, 13 aa, Severe acute respiratory syndrome-related coronavirus
  REGION 1..13: note = Table B: HLA-DRB1*04:04L HLA-DRB1*01:01L HLA-DRB1*08:01L HLA-DRB4*02:01NL HLA-DPA1*02:01-B1*13:01L HLA-DQA1*05:05-B1*03:01L HLA-DRB1*15:01L
  source 1..13: note = Severe acute respiratory syndrome coronavirus 2
LSEISMDNSPNLA

SEQ ID NO: 16777 - protein, 13 aa, Severe acute respiratory syndrome-related coronavirus
  REGION 1..13: note = Table B: HLA-DRB1*04:04L HLA-DRB1*08:01L HLA-DPA1*02:01-B1*13:01L HLA-DPA1*01:03-B1*02:01L
  source 1..13: note = Severe acute respiratory syndrome coronavirus 2
LRANSAVKLQNNE

SEQ ID NO: 16778 - protein, 14 aa, Severe acute respiratory syndrome-related coronavirus
  REGION 1..14: note = Table B: HLA-DRB1*04:04L HLA-DRB1*04:05L HLA-DRB1*01:02L HLA-DPA1*01:03-B1*03:01L HLA-DRB1*12:01L HLA-DPA1*02:01-B1*13:01L HLA-DPA1*01:03-B1*104:01L HLA-DRB1*04:08L
  source 1..14: note = Severe acute respiratory syndrome coronavirus 2
VALRQMSCAAGTTQ

SEQ ID NO: 16779 - protein, 13 aa, Severe acute respiratory syndrome-related coronavirus
  REGION 1..13: note = Table B: HLA-DRB1*04:04L HLA-DRB1*14:01L HLA-DRB1*04:10L HLA-DRB1*14:54L HLA-DRB1*15:01L
  source 1..13: note = Severe acute respiratory syndrome coronavirus 2
NALAYYNTTKGGR

SEQ ID NO: 16780 - protein, 12 aa, Severe acute respiratory syndrome-related coronavirus
  REGION 1..12: note = Table B: HLA-DRB1*04:04L HLA-DRB1*08:04L HLA-DRB1*04:10L HLA-DRB1*12:02L HLA-DRB3*01:01L HLA-DRB1*14:54L
  source 1..12: note = Severe acute respiratory syndrome coronavirus 2
LAYYNTTKGGRF

SEQ ID NO: 16781 - protein, 12 aa, Severe acute respiratory syndrome-related coronavirus
  REGION 1..12: note = Table B: HLA-DRB1*04:04L
  source 1..12: note = Severe acute respiratory syndrome coronavirus 2
AYYNTTKGGRFV

SEQ ID NO: 16782 - protein, 14 aa, Severe acute respiratory syndrome-related coronavirus
  REGION 1..14: note = Table B: HLA-DRB1*04:04L HLA-DRB1*11:01L HLA-DRB1*07:01L
  source 1..14: note = Severe acute respiratory syndrome coronavirus 2
KGGRFVLALLSDLQ

SEQ ID NO: 16783 - protein, 12 aa, Severe acute respiratory syndrome-related coronavirus
  REGION 1..12: note = Table B: HLA-DRB1*04:04L HLA-DRB1*08:04L HLA-DRB1*08:77L HLA-DPA1*03:01-B1*04:02L HLA-DRB1*11:03L HLA-DRB1*11:04L HLA-DQA1*01-B1*05L HLA-DPA1*01:03-B1*04:01L HLA-DRB1*04:10L HLA-DRB1*09:01L HLA-DPA1*02:01-B1*13:01L HLA-DRB1*14:54L
  REGION 1..12: note = CONT. FROM ABOVE: HLA-DPA1*01:03-B1*104:01L HLA-DRB1*07:01L HLA- DRB1*10:01L
  source 1..12: note = Severe acute respiratory syndrome coronavirus 2
GMVLGSLAATVR

SEQ ID NO: 16784 - protein, 15 aa, Severe acute respiratory syndrome-related coronavirus
  REGION 1..15: note = Table B: HLA-DRB1*04:04L HLA-DRB1*04:10L HLA-DRB1*12:02L HLA-DPA1*01:03-B1*104:01L HLA-DRB1*07:01L HLA-DRB1*10:01L
  source 1..15: note = Severe acute respiratory syndrome coronavirus 2
ATVRLQAGNATEVPA

SEQ ID NO: 16785 - protein, 13 aa, Severe acute respiratory syndrome-related coronavirus
  REGION 1..13: note = Table B: HLA-DRB1*04:04L HLA-DRB1*04:05L HLA-DRB1*01:02L HLA-DRB1*04:10L HLA-DRB1*04:08L HLA-DRB1*15:01L
  source 1..13: note = Severe acute respiratory syndrome coronavirus 2
VDAAKAYKDYLAS

SEQ ID NO: 16786 - protein, 14 aa, Severe acute respiratory syndrome-related coronavirus
  REGION 1..14: note = Table B: HLA-DRB1*04:04L HLA-DRB1*11:04L HLA-DRB1*14:02L HLA-DRB1*08:01L HLA-DRB4*01:01L HLA-DPA1*02:01-B1*13:01L HLA-DPA1*01:03-B1*104:01L HLA-DPA1*01:02-B1*04:01L HLA-DRB1*10:01L
  source 1..14: note = Severe acute respiratory syndrome coronavirus 2
TGQAITVTPEANMD

SEQ ID NO: 16787 - protein, 13 aa, Severe acute respiratory syndrome-related coronavirus
  REGION 1..13: note = Table B: HLA-DRB1*04:04L HLA-DRB1*01:02L HLA-DRB1*08:04L HLA-DRB1*11:04L HLA-DQA1*01:01-B1*05:01L HLA-DRB1*08:01L HLA-DRB4*01:01L HLA-DRB1*09:01L HLA-DPA1*02:01-B1*13:01L HLA-DPA1*01:03-B1*104:01L HLA-DRB1*10:01L HLA-DRB1*04:08L
  source 1..13: note = Severe acute respiratory syndrome coronavirus 2
REPMLQSADAQSF

SEQ ID NO: 16788 - protein, 13 aa, Severe acute respiratory syndrome-related coronavirus
  REGION 1..13: note = Table B: HLA-DRB1*04:04L HLA-DRB1*01:02L HLA-DRB1*08:04L HLA-DRB1*11:03L HLA-DRB4*01:01L HLA-DRB1*09:01L HLA-DPA1*01:03-B1*04:02L HLA-DPA1*02:01-B1*13:01L HLA-DPA1*01:03-B1*104:01L HLA-DRB1*10:01L HLA-DRB1*04:08L
  REGION 1..13: note = CONT. FROM ABOVE: HLA-DRB1*08:03L
  source 1..13: note = Severe acute respiratory syndrome coronavirus 2
EPMLQSADAQSFL

SEQ ID NO: 16789 - protein, 13 aa, Severe acute respiratory syndrome-related coronavirus
  REGION 1..13: note = Table B: HLA-DRB1*04:04L HLA-DRB1*11:02L HLA-DRB1*13:01L
  source 1..13: note = Severe acute respiratory syndrome coronavirus 2
AFDIYNDKVAGFA

SEQ ID NO: 16790 - protein, 12 aa, Severe acute respiratory syndrome-related coronavirus
  REGION 1..12: note = Table B: HLA-DRB1*04:04L HLA-DRB1*13:01L HLA-DRB1*04:10L HLA-DRB1*12:02L HLA-DPA1*01:03-B1*02:01L
  source 1..12: note = Severe acute respiratory syndrome coronavirus 2
DIYNDKVAGFAK

SEQ ID NO: 16791 - protein, 14 aa, Severe acute respiratory syndrome-related coronavirus
  REGION 1..14: note = Table B: HLA-DRB1*04:04L HLA-DRB1*11:04L HLA-DRB1*11:01L HLA-DPA1*02:01-B1*13:01L HLA-DPA1*01:03-B1*02:01L
  source 1..14: note = Severe acute respiratory syndrome coronavirus 2
DDNLIDSYFVVKRH

SEQ ID NO: 16792 - protein, 14 aa, Severe acute respiratory syndrome-related coronavirus
  REGION 1..14: note = Table B: HLA-DRB1*04:04L HLA-DRB1*14:01L HLA-DRB1*08:01L HLA-DPA1*03:01-B1*105:01L
  source 1..14: note = Severe acute respiratory syndrome coronavirus 2
YNLLKDCPAVAKHD

SEQ ID NO: 16793 - protein, 14 aa, Severe acute respiratory syndrome-related coronavirus
  REGION 1..14: note = Table B: HLA-DRB1*04:04L HLA-DQA1*01-B1*05L HLA-DRB1*13:01L HLA-DRB1*07:01L HLA-DRB1*15:01L
  source 1..14: note = Severe acute respiratory syndrome coronavirus 2
DGDMVPHISRQRLT

SEQ ID NO: 16794 - protein, 16 aa, Severe acute respiratory syndrome-related coronavirus
  REGION 1..16: note = Table B: HLA-DRB1*04:04L HLA-DPA1*01:03-B1*104:01L
  source 1..16: note = Severe acute respiratory syndrome coronavirus 2
ISRQRLTKYTMADLVY

SEQ ID NO: 16795 - protein, 18 aa, Severe acute respiratory syndrome-related coronavirus
  REGION 1..18: note = Table B: HLA-DRB1*04:04L HLA-DRB1*03:01L HLA-DRB1*11:02L HLA-DRB1*11:03L HLA-DRB1*11:04L HLA-DRB1*13:01L HLA-DRB4*01:01L HLA-DQA1*05:05-B1*03:116L HLA-DRB1*09:01L HLA-DPA1*01:03-B1*02:01L HLA-DRB1*07:01L HLA-DRB1*10:01L
  source 1..18: note = Severe acute respiratory syndrome coronavirus 2
DDDYFNKKDWYDFVENPD

SEQ ID NO: 16796 - protein, 12 aa, Severe acute respiratory syndrome-related coronavirus
  REGION 1..12: note = Table B: HLA-DRB1*04:04L HLA-DRB1*03:01L HLA-DRB1*07:01L
  source 1..12: note = Severe acute respiratory syndrome coronavirus 2
RVYANLGERVRQ

SEQ ID NO: 16797 - protein, 14 aa, Severe acute respiratory syndrome-related coronavirus
  REGION 1..14: note = Table B: HLA-DRB1*04:04L HLA-DPA1*01:03-B1*03:01L HLA-DPA1*02:01-B1*13:01L
  source 1..14: note = Severe acute respiratory syndrome coronavirus 2
LGERVRQALLKTVQ

SEQ ID NO: 16798 - protein, 13 aa, Severe acute respiratory syndrome-related coronavirus
  REGION 1..13: note = Table B: HLA-DRB1*04:04L HLA-DRB1*01:02L HLA-DRB1*08:04L HLA-DRB1*14:01L HLA-DRB1*14:02L HLA-DRB1*08:01L HLA-DPA1*02:01-B1*13:01L HLA-DRB1*07:01L HLA-DQA1*01:03-B1*06:01L HLA-DRB1*08:03L HLA-DRB1*15:03L
  source 1..13: note = Severe acute respiratory syndrome coronavirus 2
DFGDFIQTTPGSG

SEQ ID NO: 16799 - protein, 13 aa, Severe acute respiratory syndrome-related coronavirus
  REGION 1..13: note = Table B: HLA-DRB1*04:04L HLA-DRB1*11:04L HLA-DRB1*14:02L HLA-DRB1*04:10L HLA-DRB1*12:02L HLA-DRB1*10:01L HLA-DRB1*04:08L
  source 1..13: note = Severe acute respiratory syndrome coronavirus 2
DFIQTTPGSGVPV

SEQ ID NO: 16800 - protein, 14 aa, Severe acute respiratory syndrome-related coronavirus
  REGION 1..14: note = Table B: HLA-DRB1*04:04L
  source 1..14: note = Severe acute respiratory syndrome coronavirus 2
TLTRALTAESHVDT

SEQ ID NO: 16801 - protein, 14 aa, Severe acute respiratory syndrome-related coronavirus
  REGION 1..14: note = Table B: HLA-DRB1*04:04L HLA-DRB1*08:03L
  source 1..14: note = Severe acute respiratory syndrome coronavirus 2
ESHVDTDLTKPYIK

SEQ ID NO: 16802 - protein, 14 aa, Severe acute respiratory syndrome-related coronavirus
  REGION 1..14: note = Table B: HLA-DRB1*04:04L HLA-DRB1*01:01L HLA-DRB5*01:01L HLA-DRB4*02:01NL HLA-DRB1*13:01L HLA-DRB1*04:10L HLA-DPA1*01:03-B1*02:01L HLA-DRB1*07:01L HLA-DRB1*08:02L HLA-DRB1*15:01L
  source 1..14: note = Severe acute respiratory syndrome coronavirus 2
VRKIFVDGVPFVVS

SEQ ID NO: 16803 - protein, 14 aa, Severe acute respiratory syndrome-related coronavirus
  REGION 1..14: note = Table B: HLA-DRB1*04:04L HLA-DRB1*01:01L HLA-DQA1*01:01-B1*05:01L HLA-DRB1*08:01L HLA-DPA1*01:03-B1*02:01L HLA-DRB1*07:01L HLA-DRB1*08:02L
  source 1..14: note = Severe acute respiratory syndrome coronavirus 2
KIFVDGVPFVVSTG

SEQ ID NO: 16804 - protein, 13 aa, Severe acute respiratory syndrome-related coronavirus
  REGION 1..13: note = Table B: HLA-DRB1*04:04L HLA-DRB1*15:01L
  source 1..13: note = Severe acute respiratory syndrome coronavirus 2
GVPFVVSTGYHFR

SEQ ID NO: 16805 - protein, 13 aa, Severe acute respiratory syndrome-related coronavirus
  REGION 1..13: note = Table B: HLA-DRB1*04:04L HLA-DRB1*15:01L
  source 1..13: note = Severe acute respiratory syndrome coronavirus 2
VPFVVSTGYHFRE

SEQ ID NO: 16806 - protein, 13 aa, Severe acute respiratory syndrome-related coronavirus
  REGION 1..13: note = Table B: HLA-DRB1*04:04L HLA-DRB1*08:04L HLA-DRB3*02:01L HLA-DPA1*03:01-B1*04:02L HLA-DRB1*14:01L HLA-DRB1*11:03L HLA-DRB1*11:04L HLA-DRB1*14:02L HLA-DPA1*01:03-B1*04:02L HLA-DPA1*01:02-B1*04:01L HLA-DRB1*07:01L HLA-DRB1*08:03L
  source 1..13: note = Severe acute respiratory syndrome coronavirus 2
FRELGVVHNQDVN

SEQ ID NO: 16807 - protein, 13 aa, Severe acute respiratory syndrome-related coronavirus
  REGION 1..13: note = Table B: HLA-DRB1*04:04L
  source 1..13: note = Severe acute respiratory syndrome coronavirus 2
ELGVVHNQDVNLH

SEQ ID NO: 16808 - protein, 12 aa, Severe acute respiratory syndrome-related coronavirus
  REGION 1..12: note = Table B: HLA-DRB1*04:04L HLA-DRB1*08:04L HLA-DRB1*08:77L HLA-DRB1*11:03L HLA-DRB1*11:04L HLA-DRB1*12:02L HLA-DRB1*10:01L HLA-DRB1*08:03L
  source 1..12: note = Severe acute respiratory syndrome coronavirus 2
GVVHNQDVNLHS

SEQ ID NO: 16809 - protein, 14 aa, Severe acute respiratory syndrome-related coronavirus
  REGION 1..14: note = Table B: HLA-DRB1*04:04L HLA-DRB1*04:05L HLA-DRB1*11:04L HLA-DRB1*08:01L HLA-DRB3*01:01L
  source 1..14: note = Severe acute respiratory syndrome coronavirus 2
NQDVNLHSSRLSFK

SEQ ID NO: 16810 - protein, 14 aa, Severe acute respiratory syndrome-related coronavirus
  REGION 1..14: note = Table B: HLA-DRB1*04:04L HLA-DRB1*11:04L HLA-DRB3*01:01L
  source 1..14: note = Severe acute respiratory syndrome coronavirus 2
QDVNLHSSRLSFKE

SEQ ID NO: 16811 - protein, 13 aa, Severe acute respiratory syndrome-related coronavirus
  REGION 1..13: note = Table B: HLA-DRB1*04:04L
  source 1..13: note = Severe acute respiratory syndrome coronavirus 2
FKELLVYAADPAM

SEQ ID NO: 16812 - protein, 12 aa, Severe acute respiratory syndrome-related coronavirus
  REGION 1..12: note = Table B: HLA-DRB1*04:04L HLA-DPA1*02:01-B1*13:01L
  source 1..12: note = Severe acute respiratory syndrome coronavirus 2
ELLVYAADPAMH

SEQ ID NO: 16813 - protein, 12 aa, Severe acute respiratory syndrome-related coronavirus
  REGION 1..12: note = Table B: HLA-DRB1*04:04L HLA-DRB5*01:01L HLA-DRB1*09:01L HLA-DPA1*02:01-B1*13:01L HLA-DRB1*08:03L
  source 1..12: note = Severe acute respiratory syndrome coronavirus 2
LLVYAADPAMHA

SEQ ID NO: 16814 - protein, 12 aa, Severe acute respiratory syndrome-related coronavirus
  REGION 1..12: note = Table B: HLA-DRB1*04:04L HLA-DRB1*01:01L HLA-DRB5*01:01L HLA-DRB1*13:01L HLA-DRB4*01:01L HLA-DRB1*07:01L
  source 1..12: note = Severe acute respiratory syndrome coronavirus 2
LVYAADPAMHAA

SEQ ID NO: 16815 - protein, 11 aa, Severe acute respiratory syndrome-related coronavirus
  REGION 1..11: note = Table B: HLA-DRB1*04:04L
  source 1..11: note = Severe acute respiratory syndrome coronavirus 2
YAADPAMHAAS

SEQ ID NO: 16816 - protein, 14 aa, Severe acute respiratory syndrome-related coronavirus
  REGION 1..14: note = Table B: HLA-DRB1*04:04L
  source 1..14: note = Severe acute respiratory syndrome coronavirus 2
DPAMHAASGNLLLD

SEQ ID NO: 16817 - protein, 12 aa, Severe acute respiratory syndrome-related coronavirus
  REGION 1..12: note = Table B: HLA-DRB1*04:04L HLA-DRB1*04:08L
  source 1..12: note = Severe acute respiratory syndrome coronavirus 2
FSVAALTNNVAF

SEQ ID NO: 16818 - protein, 12 aa, Severe acute respiratory syndrome-related coronavirus
  REGION 1..12: note = Table B: HLA-DRB1*04:04L HLA-DRB1*08:04L HLA-DRB3*02:01L HLA-DPA1*02:01-B1*13:01L HLA-DPA1*01:03-B1*104:01L
  source 1..12: note = Severe acute respiratory syndrome coronavirus 2
NNVAFQTVKPGN

SEQ ID NO: 16819 - protein, 13 aa, Severe acute respiratory syndrome-related coronavirus
  REGION 1..13: note = Table B: HLA-DRB1*04:04L HLA-DRB1*08:01L HLA-DRB1*08:03L
  source 1..13: note = Severe acute respiratory syndrome coronavirus 2
INANQVIVNNLDK

SEQ ID NO: 16820 - protein, 12 aa, Severe acute respiratory syndrome-related coronavirus
  REGION 1..12: note = Table B: HLA-DRB1*04:04L HLA-DRB1*01:02L HLA-DRB1*08:04L HLA-DRB1*08:77L HLA-DRB3*02:01L HLA-DPA1*01:03-B1*03:01L HLA-DRB1*11:03L HLA-DRB1*11:04L HLA-DRB1*14:02L HLA-DQA1*01:01-B1*05:01L HLA-DQA1*05:05-B1*03:19L
  REGION 1..12: note = CONT. FROM ABOVE: HLA-DRB1*12:02L HLA-DPA1*02:01-B1*13:01L HLA-D PA1*03:01-B1*105:01L HLA-DQA1*05:05-B1*03:01L HLA-DRB1*08:03L
  source 1..12: note = Severe acute respiratory syndrome coronavirus 2
ANQVIVNNLDKS

SEQ ID NO: 16821 - protein, 13 aa, Severe acute respiratory syndrome-related coronavirus
  REGION 1..13: note = Table B: HLA-DRB1*04:04L HLA-DRB1*01:01L HLA-DRB1*11:02L HLA-DQA1*01:01-B1*05:01L HLA-DRB1*11:01L HLA-DRB4*02:01NL HLA-DRB1*13:01L HLA-DRB4*01:01L HLA-DPA1*01:03-B1*04:02L HLA-DPA1*01:03-B1*104:01L HLA-DRB1*08:02L HLA-DRB1*15:01L
  source 1..13: note = Severe acute respiratory syndrome coronavirus 2
VNNLDKSAGFPFN

SEQ ID NO: 16822 - protein, 14 aa, Severe acute respiratory syndrome-related coronavirus
  REGION 1..14: note = Table B: HLA-DRB1*04:04L HLA-DRB1*04:05L HLA-DRB1*01:01L
  source 1..14: note = Severe acute respiratory syndrome coronavirus 2
SYEDQDALFAYTKR

SEQ ID NO: 16823 - protein, 14 aa, Severe acute respiratory syndrome-related coronavirus
  REGION 1..14: note = Table B: HLA-DRB1*04:04L HLA-DPA1*01:03-B1*104:01L HLA-DRB1*04:08L
  source 1..14: note = Severe acute respiratory syndrome coronavirus 2
TKRNVIPTITQMNL

SEQ ID NO: 16824 - protein, 12 aa, Severe acute respiratory syndrome-related coronavirus
  REGION 1..12: note = Table B: HLA-DRB1*04:04L HLA-DRB1*11:03L HLA-DPA1*02:01-B1*13:01L HLA-DPA1*01:02-B1*04:01L HLA-DRB1*07:01L HLA-DRB1*15:03L
  source 1..12: note = Severe acute respiratory syndrome coronavirus 2
LKYAISAKNRAR

SEQ ID NO: 16825 - protein, 15 aa, Severe acute respiratory syndrome-related coronavirus
  REGION 1..15: note = Table B: HLA-DRB1*04:04L HLA-DPA1*01:03-B1*04:02L HLA-DQA1*02:01-B1*03:03L
  source 1..15: note = Severe acute respiratory syndrome coronavirus 2
TNRQFHQKLLKSIAA

SEQ ID NO: 16826 - protein, 14 aa, Severe acute respiratory syndrome-related coronavirus
  REGION 1..14: note = Table B: HLA-DRB1*04:04L HLA-DRB1*01:01L HLA-DRB1*11:04L HLA-DRB1*11:01L HLA-DRB1*04:10L HLA-DRB3*01:01L HLA-DPA1*01:02-B1*04:01L HLA-DRB1*07:01L HLA-DRB1*15:03L
  source 1..14: note = Severe acute respiratory syndrome coronavirus 2
AATRGATVVIGTSK

SEQ ID NO: 16827 - protein, 14 aa, Severe acute respiratory syndrome-related coronavirus
  REGION 1..14: note = Table B: HLA-DRB1*04:04L HLA-DRB1*11:04L HLA-DRB1*11:01L HLA-DRB3*01:01L
  source 1..14: note = Severe acute respiratory syndrome coronavirus 2
TVVIGTSKFYGGWH

SEQ ID NO: 16828 - protein, 13 aa, Severe acute respiratory syndrome-related coronavirus
  REGION 1..13: note = Table B: HLA-DRB1*04:04L HLA-DRB1*07:01L
  source 1..13: note = Severe acute respiratory syndrome coronavirus 2
LARKHTTCCSLSH

SEQ ID NO: 16829 - protein, 13 aa, Severe acute respiratory syndrome-related coronavirus
  REGION 1..13: note = Table B: HLA-DRB1*04:04L HLA-DQA1*01:02-B1*06:02L HLA-DRB1*08:01L HLA-DRB1*07:01L HLA-DRB1*04:08L HLA-DQA1*02:01-B1*03:03L
  source 1..13: note = Severe acute respiratory syndrome coronavirus 2
ARKHTTCCSLSHR

SEQ ID NO: 16830 - protein, 13 aa, Severe acute respiratory syndrome-related coronavirus
  REGION 1..13: note = Table B: HLA-DRB1*04:04L HLA-DRB1*04:05L HLA-DRB1*01:02L HLA-DRB1*12:01L HLA-DPA1*02:01-B1*13:01L
  source 1..13: note = Severe acute respiratory syndrome coronavirus 2
LSHRFYRLANECA

SEQ ID NO: 16831 - protein, 13 aa, Severe acute respiratory syndrome-related coronavirus
  REGION 1..13: note = Table B: HLA-DRB1*04:04L HLA-DRB1*03:01L HLA-DRB1*11:01L HLA-DRB1*15:01L
  source 1..13: note = Severe acute respiratory syndrome coronavirus 2
NALLSTDGNKIAD

SEQ ID NO: 16832 - protein, 12 aa, Severe acute respiratory syndrome-related coronavirus
  REGION 1..12: note = Table B: HLA-DRB1*04:04L HLA-DQA1*01:02-B1*06:02L HLA-DRB1*08:04L HLA-DPA1*01:03-B1*03:01L HLA-DPA1*03:01-B1*04:02L HLA-DRB1*11:03L HLA-DRB1*14:02L HLA-DRB1*11:01L HLA-DQA1*05:05-B1*03:19L HLA-DRB1*04:10L
  REGION 1..12: note = CONT. FROM ABOVE: HLA-DRB1*12:02L HLA-DRB3*01:01L HLA-DPA1*03:01 -B1*105:01L HLA-DRB1*10:01L HLA-DRB1*04:08L
  source 1..12: note = Severe acute respiratory syndrome coronavirus 2
LLSTDGNKIADK

SEQ ID NO: 16833 - protein, 13 aa, Severe acute respiratory syndrome-related coronavirus
  REGION 1..13: note = Table B: HLA-DRB1*04:04L HLA-DRB1*01:02L HLA-DRB1*08:01L HLA-DPA1*02:01-B1*13:01L HLA-DPA1*01:02-B1*04:01L HLA-DRB1*07:01L HLA-DRB1*04:08L
  source 1..13: note = Severe acute respiratory syndrome coronavirus 2
LQHRLYECLYRNR

SEQ ID NO: 16834 - protein, 12 aa, Severe acute respiratory syndrome-related coronavirus
  REGION 1..12: note = Table B: HLA-DRB1*04:04L HLA-DRB1*04:05L HLA-DRB1*08:04L HLA-DRB3*02:01L HLA-DRB1*12:02L HLA-DRB1*14:54L HLA-DRB1*04:08L
  source 1..12: note = Severe acute respiratory syndrome coronavirus 2
VASIKNFKSVLY

SEQ ID NO: 16835 - protein, 13 aa, Severe acute respiratory syndrome-related coronavirus
  REGION 1..13: note = Table B: HLA-DRB1*04:04L HLA-DRB1*04:05L HLA-DRB3*02:01L HLA-DRB1*08:01L HLA-DRB3*01:01L
  source 1..13: note = Severe acute respiratory syndrome coronavirus 2
ASIKNFKSVLYYQ

SEQ ID NO: 16836 - protein, 15 aa, Severe acute respiratory syndrome-related coronavirus
  REGION 1..15: note = Table B: HLA-DRB1*04:04L HLA-DRB1*16:01L HLA-DRB1*15:03L
  source 1..15: note = Severe acute respiratory syndrome coronavirus 2
PHEFCSQHTMLVKQG

SEQ ID NO: 16837 - protein, 11 aa, Severe acute respiratory syndrome-related coronavirus
  REGION 1..11: note = Table B: HLA-DRB1*04:04L HLA-DQA1*01:02-B1*06:02L HLA-DRB1*01:02L HLA-DRB3*02:01L HLA-DRB1*14:01L HLA-DRB1*04:10L HLA-DPA1*01:03-B1*04:02L HLA-DRB1*12:02L HLA-DRB1*14:54L HLA-DRB1*15:03L
  source 1..11: note = Severe acute respiratory syndrome coronavirus 2
YVYLPYPDPSR

SEQ ID NO: 16838 - protein, 13 aa, Severe acute respiratory syndrome-related coronavirus
  REGION 1..13: note = Table B: HLA-DRB1*04:04L
  source 1..13: note = Severe acute respiratory syndrome coronavirus 2
TDGTLMIERFVSL

SEQ ID NO: 16839 - protein, 13 aa, Severe acute respiratory syndrome-related coronavirus
  REGION 1..13: note = Table B: HLA-DRB1*04:04L
  source 1..13: note = Severe acute respiratory syndrome coronavirus 2
DGTLMIERFVSLA

SEQ ID NO: 16840 - protein, 14 aa, Severe acute respiratory syndrome-related coronavirus
  REGION 1..14: note = Table B: HLA-DRB1*04:04L
  source 1..14: note = Severe acute respiratory syndrome coronavirus 2
SLAIDAYPLTKHPN

SEQ ID NO: 16841 - protein, 15 aa, Severe acute respiratory syndrome-related coronavirus
  REGION 1..15: note = Table B: HLA-DRB1*04:04L HLA-DRB1*11:03L
  source 1..15: note = Severe acute respiratory syndrome coronavirus 2
DAYPLTKHPNQEYAD

SEQ ID NO: 16842 - protein, 13 aa, Severe acute respiratory syndrome-related coronavirus
  REGION 1..13: note = Table B: HLA-DRB1*04:04L HLA-DRB4*03:01NL HLA-DRB1*14:54L HLA-DRB1*10:01L HLA-DRB1*16:01L HLA-DRB1*04:08L
  source 1..13: note = Severe acute respiratory syndrome coronavirus 2
DMYSVMLTNDNTS

SEQ ID NO: 16843 - protein, 15 aa, Severe acute respiratory syndrome-related coronavirus
  REGION 1..15: note = Table B: HLA-DRB1*04:04L
  source 1..15: note = Severe acute respiratory syndrome coronavirus 2
RYWEPEFYEAMYTPH

SEQ ID NO: 16844 - protein, 12 aa, Severe acute respiratory syndrome-related coronavirus
  REGION 1..12: note = Table B: HLA-DRB1*04:04L HLA-DRB1*08:04L HLA-DPA1*01:03-B1*03:01L HLA-DPA1*03:01-B1*04:02L HLA-DRB1*08:01L HLA-DQA1*05:01-B1*02:01L HLA-DPA1*01:03-B1*04:02L HLA-DQA1*05:05-B1*03:01L
  source 1..12: note = Severe acute respiratory syndrome coronavirus 2
MYTPHTVLQAVG

SEQ ID NO: 16845 - protein, 14 aa, Severe acute respiratory syndrome-related coronavirus
  REGION 1..14: note = Table B: HLA-DRB1*04:04L HLA-DPA1*03:01-B1*105:01L HLA-DQA1*05:05-B1*03:01L
  source 1..14: note = Severe acute respiratory syndrome coronavirus 2
SHKLVLSVNPYVCN

SEQ ID NO: 16846 - protein, 14 aa, Severe acute respiratory syndrome-related coronavirus
  REGION 1..14: note = Table B: HLA-DRB1*04:04L HLA-DPA1*03:01-B1*105:01L
  source 1..14: note = Severe acute respiratory syndrome coronavirus 2
LGGMSYYCKSHKPP

SEQ ID NO: 16847 - protein, 13 aa, Severe acute respiratory syndrome-related coronavirus
  REGION 1..13: note = Table B: HLA-DRB1*04:04L HLA-DRB1*08:77L HLA-DRB3*02:01L HLA-DRB1*03:01L HLA-DRB1*11:03L HLA-DRB1*11:04L HLA-DRB1*14:02L HLA-DRB1*11:01L HLA-DPA1*01:03-B1*04:02L HLA-DRB3*01:01L HLA-DPA1*02:01-B1*13:01L HLA-DRB1*14:54L HLA-DRB1*08:03L
  source 1..13: note = Severe acute respiratory syndrome coronavirus 2
DYILANTCTERLK

SEQ ID NO: 16848 - protein, 13 aa, Severe acute respiratory syndrome-related coronavirus
  REGION 1..13: note = Table B: HLA-DRB1*04:04L HLA-DRB1*04:05L HLA-DPA1*01:03-B1*02:01L
  source 1..13: note = Severe acute respiratory syndrome coronavirus 2
NRNYVFTGYRVTK

SEQ ID NO: 16849 - protein, 13 aa, Severe acute respiratory syndrome-related coronavirus
  REGION 1..13: note = Table B: HLA-DRB1*04:04L HLA-DRB1*04:05L HLA-DPA1*02:01-B1*13:01L
  source 1..13: note = Severe acute respiratory syndrome coronavirus 2
RNYVFTGYRVTKN

SEQ ID NO: 16850 - protein, 14 aa, Severe acute respiratory syndrome-related coronavirus
  REGION 1..14: note = Table B: HLA-DRB1*04:04L
  source 1..14: note = Severe acute respiratory syndrome coronavirus 2
NYVFTGYRVTKNSK

SEQ ID NO: 16851 - protein, 14 aa, Severe acute respiratory syndrome-related coronavirus
  REGION 1..14: note = Table B: HLA-DRB1*04:04L HLA-DRB1*08:04L HLA-DRB1*11:04L HLA-DRB1*11:01L HLA-DRB3*01:01L
  source 1..14: note = Severe acute respiratory syndrome coronavirus 2
RVTKNSKVQIGEYT

SEQ ID NO: 16852 - protein, 14 aa, Severe acute respiratory syndrome-related coronavirus
  REGION 1..14: note = Table B: HLA-DRB1*04:04L HLA-DRB1*04:05L HLA-DRB1*08:04L HLA-DRB1*15:03L
  source 1..14: note = Severe acute respiratory syndrome coronavirus 2
KGDYGDAVVYRGTT

SEQ ID NO: 16853 - protein, 14 aa, Severe acute respiratory syndrome-related coronavirus
  REGION 1..14: note = Table B: HLA-DRB1*04:04L HLA-DRB1*08:04L HLA-DRB1*11:01L HLA-DPA1*01:03-B1*104:01L HLA-DRB1*15:03L
  source 1..14: note = Severe acute respiratory syndrome coronavirus 2
GDYGDAVVYRGTTT

SEQ ID NO: 16854 - protein, 15 aa, Severe acute respiratory syndrome-related coronavirus
  REGION 1..15: note = Table B: HLA-DRB1*04:04L HLA-DRB1*01:01L HLA-DRB1*13:01L HLA-DPA1*01:03-B1*02:01L HLA-DRB1*07:01L HLA-DRB1*08:03L
  source 1..15: note = Severe acute respiratory syndrome coronavirus 2
APTLVPQEHYVRITG

SEQ ID NO: 16855 - protein, 13 aa, Severe acute respiratory syndrome-related coronavirus
  REGION 1..13: note = Table B: HLA-DRB1*04:04L HLA-DRB1*01:02L HLA-DQA1*01:01-B1*05:01L HLA-DRB1*08:01L HLA-DRB1*11:01L HLA-DRB5*01:01L HLA-DRB3*01:01L HLA-DPA1*02:01-B1*13:01L HLA-DRB1*07:01L HLA-DQA1*01:03-B1*06:01L HLA-DRB1*08:03L
  source 1..13: note = Severe acute respiratory syndrome coronavirus 2
ISDEFSSNVANYQ

SEQ ID NO: 16856 - protein, 13 aa, Severe acute respiratory syndrome-related coronavirus
  REGION 1..13: note = Table B: HLA-DRB1*04:04L HLA-DRB1*08:04L HLA-DRB1*11:03L HLA-DRB1*11:04L HLA-DRB3*01:01L
  source 1..13: note = Severe acute respiratory syndrome coronavirus 2
SNVANYQKVGMQK

SEQ ID NO: 16857 - protein, 14 aa, Severe acute respiratory syndrome-related coronavirus
  REGION 1..14: note = Table B: HLA-DRB1*04:04L
  source 1..14: note = Severe acute respiratory syndrome coronavirus 2
VANYQKVGMQKYST

SEQ ID NO: 16858 - protein, 15 aa, Severe acute respiratory syndrome-related coronavirus
  REGION 1..15: note = Table B: HLA-DRB1*04:04L HLA-DRB1*08:04L HLA-DQA1*03:01-B1*03:02L
  source 1..15: note = Severe acute respiratory syndrome coronavirus 2
GKSHFAIGLALYYPS

SEQ ID NO: 16859 - protein, 14 aa, Severe acute respiratory syndrome-related coronavirus
  REGION 1..14: note = Table B: HLA-DRB1*04:04L
  source 1..14: note = Severe acute respiratory syndrome coronavirus 2
IGLALYYPSARIVY

SEQ ID NO: 16860 - protein, 14 aa, Severe acute respiratory syndrome-related coronavirus
  REGION 1..14: note = Table B: HLA-DRB1*04:04L HLA-DRB1*15:01L
  source 1..14: note = Severe acute respiratory syndrome coronavirus 2
GLALYYPSARIVYT

SEQ ID NO: 16861 - protein, 13 aa, Severe acute respiratory syndrome-related coronavirus
  REGION 1..13: note = Table B: HLA-DRB1*04:04L HLA-DQA1*01:02-B1*06:02L HLA-DRB1*01:02L HLA-DPA1*01:03-B1*03:01L HLA-DRB1*12:01L HLA-DPA1*02:01-B1*13:01L HLA-DQA1*03:01-B1*03:02L HLA-DQA1*02:01-B1*03:03L
  source 1..13: note = Severe acute respiratory syndrome coronavirus 2
YPSARIVYTACSH

SEQ ID NO: 16862 - protein, 14 aa, Severe acute respiratory syndrome-related coronavirus
  REGION 1..14: note = Table B: HLA-DRB1*04:04L HLA-DPA1*01:03-B1*03:01L
  source 1..14: note = Severe acute respiratory syndrome coronavirus 2
PSARIVYTACSHAA

SEQ ID NO: 16863 - protein, 13 aa, Severe acute respiratory syndrome-related coronavirus
  REGION 1..13: note = Table B: HLA-DRB1*04:04L HLA-DPA1*01:03-B1*02:01L
  source 1..13: note = Severe acute respiratory syndrome coronavirus 2
DKFKVNSTLEQYV

SEQ ID NO: 16864 - protein, 15 aa, Severe acute respiratory syndrome-related coronavirus
  REGION 1..15: note = Table B: HLA-DRB1*04:04L
  source 1..15: note = Severe acute respiratory syndrome coronavirus 2
ISMATNYDLSVVNAR

SEQ ID NO: 16865 - protein, 14 aa, Severe acute respiratory syndrome-related coronavirus
  REGION 1..14: note = Table B: HLA-DRB1*04:04L HLA-DRB3*01:01L HLA-DRB1*07:01L
  source 1..14: note = Severe acute respiratory syndrome coronavirus 2
ATNYDLSVVNARLR

SEQ ID NO: 16866 - protein, 12 aa, Severe acute respiratory syndrome-related coronavirus
  REGION 1..12: note = Table B: HLA-DRB1*04:04L HLA-DQA1*01:02-B1*06:02L HLA-DRB1*01:02L HLA-DRB1*08:04L HLA-DPA1*02:01-B1*13:01L HLA-DPA1*03:01-B1*105:01L HLA-DRB1*15:03L
  source 1..12: note = Severe acute respiratory syndrome coronavirus 2
HYVYIGDPAQLP

SEQ ID NO: 16867 - protein, 13 aa, Severe acute respiratory syndrome-related coronavirus
  REGION 1..13: note = Table B: HLA-DRB1*04:04L HLA-DRB1*08:04L HLA-DRB1*11:01L HLA-DPA1*01:03-B1*104:01L HLA-DRB1*07:01L HLA-DRB1*08:03L
  source 1..13: note = Severe acute respiratory syndrome coronavirus 2
IGDPAQLPAPRTL

SEQ ID NO: 16868 - protein, 17 aa, Severe acute respiratory syndrome-related coronavirus
  REGION 1..17: note = Table B: HLA-DRB1*04:04L HLA-DRB1*04:10L HLA-DRB1*07:01L
  source 1..17: note = Severe acute respiratory syndrome coronavirus 2
LPAPRTLLTKGTLEPEY

SEQ ID NO: 16869 - protein, 13 aa, Severe acute respiratory syndrome-related coronavirus
  REGION 1..13: note = Table B: HLA-DRB1*04:04L HLA-DRB1*08:04L HLA-DRB1*11:04L HLA-DRB3*01:01L
  source 1..13: note = Severe acute respiratory syndrome coronavirus 2
GTLEPEYFNSVCR

SEQ ID NO: 16870 - protein, 13 aa, Severe acute respiratory syndrome-related coronavirus
  REGION 1..13: note = Table B: HLA-DRB1*04:04L HLA-DRB1*08:04L HLA-DRB3*02:01L HLA-DRB1*11:04L HLA-DQA1*01:01-B1*05:01L HLA-DRB1*11:01L HLA-DRB1*04:10L HLA-DRB3*01:01L HLA-DRB1*14:17L HLA-DRB1*07:01L HLA-DRB1*10:01L HLA-DRB1*08:03L
  source 1..13: note = Severe acute respiratory syndrome coronavirus 2
KMFYKGVITHDVS

SEQ ID NO: 16871 - protein, 15 aa, Severe acute respiratory syndrome-related coronavirus
  REGION 1..15: note = Table B: HLA-DRB1*04:04L HLA-DRB1*11:04L HLA-DRB1*11:01L HLA-DRB3*01:01L
  source 1..15: note = Severe acute respiratory syndrome coronavirus 2
IGVVREFLTRNPAWR

SEQ ID NO: 16872 - protein, 13 aa, Severe acute respiratory syndrome-related coronavirus
  REGION 1..13: note = Table B: HLA-DRB1*04:04L HLA-DRB4*03:01NL HLA-DPA1*01:03-B1*03:01L HLA-DRB1*14:01L
  source 1..13: note = Severe acute respiratory syndrome coronavirus 2
KAVFISPYNSQNA

SEQ ID NO: 16873 - protein, 13 aa, Severe acute respiratory syndrome-related coronavirus
  REGION 1..13: note = Table B: HLA-DRB1*04:04L HLA-DPA1*01:03-B1*03:01L HLA-DRB1*14:01L HLA-DRB3*01:01L HLA-DPA1*02:01-B1*13:01L HLA-DQA1*01:03-B1*06:01L
  source 1..13: note = Severe acute respiratory syndrome coronavirus 2
NVNRFNVAITRAK

SEQ ID NO: 16874 - protein, 12 aa, Severe acute respiratory syndrome-related coronavirus
  REGION 1..12: note = Table B: HLA-DRB1*04:04L HLA-DPA1*01:03-B1*03:01L HLA-DRB1*11:04L HLA-DRB1*11:01L HLA-DRB3*01:01L HLA-DPA1*02:01-B1*13:01L HLA-DRB1*07:01L
  source 1..12: note = Severe acute respiratory syndrome coronavirus 2
RFNVAITRAKVG

SEQ ID NO: 16875 - protein, 17 aa, Severe acute respiratory syndrome-related coronavirus
  REGION 1..17: note = Table B: HLA-DRB1*04:04L HLA-DRB1*11:02L HLA-DQA1*05:05-B1*03:01L HLA-DRB1*07:01L HLA-DRB1*10:01L HLA-DRB1*08:02L HLA-DRB1*08:03L
  source 1..17: note = Severe acute respiratory syndrome coronavirus 2
DRDLYDKLQFTSLEIPR

SEQ ID NO: 16876 - protein, 13 aa, Severe acute respiratory syndrome-related coronavirus
  REGION 1..13: note = Table B: HLA-DRB1*04:04L HLA-DRB1*04:08L
  source 1..13: note = Severe acute respiratory syndrome coronavirus 2
YQVNGYPNMFITR

SEQ ID NO: 16877 - protein, 12 aa, Severe acute respiratory syndrome-related coronavirus
  REGION 1..12: note = Table B: HLA-DRB1*04:04L HLA-DRB4*03:01NL HLA-DRB3*02:01L HLA-DRB1*11:03L HLA-DRB1*11:04L HLA-DRB1*11:01L HLA-DRB3*01:01L HLA-DRB1*10:01L
  source 1..12: note = Severe acute respiratory syndrome coronavirus 2
YVYNPFMIDVQQ

SEQ ID NO: 16878 - protein, 12 aa, Severe acute respiratory syndrome-related coronavirus
  REGION 1..12: note = Table B: HLA-DRB1*04:04L HLA-DRB1*04:05L HLA-DPA1*01:03-B1*03:01L HLA-DPA1*03:01-B1*04:02L HLA-DRB1*08:01L HLA-DRB1*04:10L HLA-DPA1*01:03-B1*02:01L HLA-DRB1*04:08L HLA-DRB1*15:03L
  source 1..12: note = Severe acute respiratory syndrome coronavirus 2
WGFTGNLQSNHD

SEQ ID NO: 16879 - protein, 15 aa, Severe acute respiratory syndrome-related coronavirus
  REGION 1..15: note = Table B: HLA-DRB1*04:04L HLA-DRB1*04:05L HLA-DRB1*01:01L HLA-DRB1*11:03L HLA-DRB1*11:04L HLA-DRB1*08:01L HLA-DRB1*11:01L HLA-DPA1*01:03-B1*02:01L HLA-DQA1*05:05-B1*03:01L
  source 1..15: note = Severe acute respiratory syndrome coronavirus 2
TGNLQSNHDLYCQVH

SEQ ID NO: 16880 - protein, 13 aa, Severe acute respiratory syndrome-related coronavirus
  REGION 1..13: note = Table B: HLA-DRB1*04:04L HLA-DRB1*04:05L HLA-DRB1*14:01L HLA-DRB1*08:01L HLA-DRB1*16:01L HLA-DRB1*15:03L
  source 1..13: note = Severe acute respiratory syndrome coronavirus 2
NAHVASCDAIMTR

SEQ ID NO: 16881 - protein, 15 aa, Severe acute respiratory syndrome-related coronavirus
  REGION 1..15: note = Table B: HLA-DRB1*04:04L HLA-DRB1*08:04L HLA-DRB3*02:01L
  source 1..15: note = Severe acute respiratory syndrome coronavirus 2
VDWTIEYPIIGDELK

SEQ ID NO: 16882 - protein, 14 aa, Severe acute respiratory syndrome-related coronavirus
  REGION 1..14: note = Table B: HLA-DRB1*04:04L HLA-DRB1*11:02L HLA-DRB1*13:01L HLA-DPA1*02:01-B1*13:01L HLA-DQA1*03:01-B1*03:02L HLA-DRB1*07:01L
  source 1..14: note = Severe acute respiratory syndrome coronavirus 2
DELKINAACRKVQH

SEQ ID NO: 16883 - protein, 13 aa, Severe acute respiratory syndrome-related coronavirus
  REGION 1..13: note = Table B: HLA-DRB1*04:04L HLA-DRB1*04:05L
  source 1..13: note = Severe acute respiratory syndrome coronavirus 2
KAALLADKFPVLH

SEQ ID NO: 16884 - protein, 15 aa, Severe acute respiratory syndrome-related coronavirus
  REGION 1..15: note = Table B: HLA-DRB1*04:04L HLA-DRB1*11:04L HLA-DRB3*01:01L HLA-DQA1*03:01-B1*03:02L
  source 1..15: note = Severe acute respiratory syndrome coronavirus 2
DKAYKIEELFYSYAT

SEQ ID NO: 16885 - protein, 15 aa, Severe acute respiratory syndrome-related coronavirus
  REGION 1..15: note = Table B: HLA-DRB1*04:04L HLA-DRB1*11:04L HLA-DRB1*11:01L HLA-DRB3*01:01L
  source 1..15: note = Severe acute respiratory syndrome coronavirus 2
KAYKIEELFYSYATH

SEQ ID NO: 16886 - protein, 13 aa, Severe acute respiratory syndrome-related coronavirus
  REGION 1..13: note = Table B: HLA-DRB1*04:04L
  source 1..13: note = Severe acute respiratory syndrome coronavirus 2
PAFDKSAFVNLKQ

SEQ ID NO: 16887 - protein, 13 aa, Severe acute respiratory syndrome-related coronavirus
  REGION 1..13: note = Table B: HLA-DRB1*04:04L HLA-DRB1*08:04L HLA-DRB3*01:01L HLA-DPA1*02:01-B1*13:01L
  source 1..13: note = Severe acute respiratory syndrome coronavirus 2
KQVVSDIDYVPLK

SEQ ID NO: 16888 - protein, 13 aa, Severe acute respiratory syndrome-related coronavirus
  REGION 1..13: note = Table B: HLA-DRB1*04:04L HLA-DRB3*01:01L HLA-DRB1*10:01L HLA-DRB1*08:03L
  source 1..13: note = Severe acute respiratory syndrome coronavirus 2
FSLWVYKQFDTYN

SEQ ID NO: 16889 - protein, 14 aa, Severe acute respiratory syndrome-related coronavirus
  REGION 1..14: note = Table B: HLA-DRB1*04:04L HLA-DRB1*08:04L HLA-DRB1*11:02L HLA-DRB3*01:01L HLA-DRB1*07:01L HLA-DRB1*10:01L
  source 1..14: note = Severe acute respiratory syndrome coronavirus 2
WVYKQFDTYNLWNT

SEQ ID NO: 16890 - protein, 13 aa, Severe acute respiratory syndrome-related coronavirus
  REGION 1..13: note = Table B: HLA-DRB1*04:04L HLA-DRB1*04:05L HLA-DRB1*08:04L HLA-DRB3*02:01L HLA-DPA1*01:03-B1*03:01L HLA-DRB1*11:02L HLA-DRB1*11:03L HLA-DRB1*11:01L HLA-DRB1*09:01L HLA-DRB3*01:01L HLA-DRB1*07:01L HLA-DRB1*08:03L HLA-DRB1*15:01L
  source 1..13: note = Severe acute respiratory syndrome coronavirus 2
DTYNLWNTFTRLQ

SEQ ID NO: 16891 - protein, 13 aa, Severe acute respiratory syndrome-related coronavirus
  REGION 1..13: note = Table B: HLA-DRB1*04:04L HLA-DRB1*04:05L HLA-DRB3*01:01L
  source 1..13: note = Severe acute respiratory syndrome coronavirus 2
QSLENVAFNVVNK

SEQ ID NO: 16892 - protein, 12 aa, Severe acute respiratory syndrome-related coronavirus
  REGION 1..12: note = Table B: HLA-DRB1*04:04L HLA-DRB1*04:05L HLA-DRB1*01:02L HLA-DRB1*08:04L HLA-DRB1*08:77L HLA-DRB3*02:01L HLA-DPA1*01:03-B1*03:01L HLA-DRB1*14:01L HLA-DRB1*11:03L HLA-DRB1*11:01L HLA-DQA1*05:05-B1*03:19L HLA-DRB1*04:10L
  REGION 1..12: note = CONT. FROM ABOVE: HLA-DRB3*01:01L HLA-DPA1*02:01-B1*13:01L HLA-D RB1*14:54L HLA-DPA1*01:03-B1*02:01L HLA-DPA1*01:03-B1*104:01L HL A-DRB1*15:03L
  source 1..12: note = Severe acute respiratory syndrome coronavirus 2
LENVAFNVVNKG

SEQ ID NO: 16893 - protein, 12 aa, Severe acute respiratory syndrome-related coronavirus
  REGION 1..12: note = Table B: HLA-DRB1*04:04L HLA-DRB1*08:04L HLA-DRB3*02:01L HLA-DRB1*11:03L HLA-DRB1*11:04L HLA-DRB1*04:10L HLA-DRB1*09:01L HLA-DRB1*12:02L HLA-DRB1*14:54L HLA-DRB1*07:01L HLA-DRB1*04:08L
  source 1..12: note = Severe acute respiratory syndrome coronavirus 2
VPVSIINNTVYT

SEQ ID NO: 16894 - protein, 15 aa, Severe acute respiratory syndrome-related coronavirus
  REGION 1..15: note = Table B: HLA-DRB1*04:04L
  source 1..15: note = Severe acute respiratory syndrome coronavirus 2
GVDVELFENKTTLPV

SEQ ID NO: 16895 - protein, 11 aa, Severe acute respiratory syndrome-related coronavirus
  REGION 1..11: note = Table B: HLA-DRB1*04:04L HLA-DPA1*01:03-B1*02:01L HLA-DRB1*08:02L
  source 1..11: note = Severe acute respiratory syndrome coronavirus 2
LFENKTTLPVN

SEQ ID NO: 16896 - protein, 12 aa, Severe acute respiratory syndrome-related coronavirus
  REGION 1..12: note = Table B: HLA-DRB1*04:04L HLA-DQA1*05:05-B1*03:116L HLA-DRB1*09:01L HLA-DPA1*01:03-B1*02:01L HLA-DPA1*01:03-B1*104:01L HLA-DRB1*07:01L
  source 1..12: note = Severe acute respiratory syndrome coronavirus 2
FENKTTLPVNVA

SEQ ID NO: 16897 - protein, 14 aa, Severe acute respiratory syndrome-related coronavirus
  REGION 1..14: note = Table B: HLA-DRB1*04:04L HLA-DRB1*01:01L HLA-DPA1*03:01-B1*04:02L HLA-DRB1*11:03L HLA-DRB3*01:01L HLA-DRB1*15:01L
  source 1..14: note = Severe acute respiratory syndrome coronavirus 2
RNIKPVPEVKILNN

SEQ ID NO: 16898 - protein, 13 aa, Severe acute respiratory syndrome-related coronavirus
  REGION 1..13: note = Table B: HLA-DRB1*04:04L HLA-DRB1*11:03L HLA-DRB1*11:04L HLA-DRB1*11:01L HLA-DRB1*09:01L HLA-DPA1*01:03-B1*02:01L HLA-DRB1*07:01L HLA-DRB1*10:01L HLA-DRB1*08:03L
  source 1..13: note = Severe acute respiratory syndrome coronavirus 2
VDIAANTVIWDYK

SEQ ID NO: 16899 - protein, 13 aa, Severe acute respiratory syndrome-related coronavirus
  REGION 1..13: note = Table B: HLA-DRB1*04:04L HLA-DRB1*08:77L HLA-DRB1*11:03L HLA-DRB1*14:02L HLA-DRB1*11:01L HLA-DQA1*05:01-B1*02:01L HLA-DPA1*02:01-B1*13:01L
  source 1..13: note = Severe acute respiratory syndrome coronavirus 2
NTVIWDYKRDAPA

SEQ ID NO: 16900 - protein, 15 aa, Severe acute respiratory syndrome-related coronavirus
  REGION 1..15: note = Table B: HLA-DRB1*04:04L HLA-DRB1*08:04L HLA-DRB1*04:08L
  source 1..15: note = Severe acute respiratory syndrome coronavirus 2
APAHISTIGVCSMTD

SEQ ID NO: 16901 - protein, 13 aa, Severe acute respiratory syndrome-related coronavirus
  REGION 1..13: note = Table B: HLA-DRB1*04:04L
  source 1..13: note = Severe acute respiratory syndrome coronavirus 2
VLITEGSVKGLQP

SEQ ID NO: 16902 - protein, 14 aa, Severe acute respiratory syndrome-related coronavirus
  REGION 1..14: note = Table B: HLA-DRB1*04:04L HLA-DRB1*11:04L HLA-DRB1*04:10L HLA-DRB1*04:08L
  source 1..14: note = Severe acute respiratory syndrome coronavirus 2
VKGLQPSVGPKQAS

SEQ ID NO: 16903 - protein, 17 aa, Severe acute respiratory syndrome-related coronavirus
  REGION 1..17: note = Table B: HLA-DRB1*04:04L
  source 1..17: note = Severe acute respiratory syndrome coronavirus 2
IGEAVKTQFNYYKKVDG

SEQ ID NO: 16904 - protein, 14 aa, Severe acute respiratory syndrome-related coronavirus
  REGION 1..14: note = Table B: HLA-DRB1*04:04L HLA-DRB1*08:04L HLA-DRB1*04:08L
  source 1..14: note = Severe acute respiratory syndrome coronavirus 2
DGVVQQLPETYFTQ

SEQ ID NO: 16905 - protein, 13 aa, Severe acute respiratory syndrome-related coronavirus
  REGION 1..13: note = Table B: HLA-DRB1*04:04L HLA-DRB1*11:04L HLA-DRB1*14:02L HLA-DQA1*01:01-B1*05:01L HLA-DRB1*11:01L HLA-DQA1*05:05-B1*03:116L HLA-DRB1*04:10L HLA-DRB3*01:01L HLA-DPA1*01:03-B1*02:01L HLA-DPA1*01:03-B1*104:01L
  REGION 1..13: note = CONT. FROM ABOVE: HLA-DRB1*10:01L HLA-DRB1*08:02L HLA-DRB1*08:03 L
  source 1..13: note = Severe acute respiratory syndrome coronavirus 2
LPETYFTQSRNLQ

SEQ ID NO: 16906 - protein, 14 aa, Severe acute respiratory syndrome-related coronavirus
  REGION 1..14: note = Table B: HLA-DRB1*04:04L HLA-DRB1*12:01L HLA-DQA1*01:03-B1*06:01L HLA-DRB1*15:03L
  source 1..14: note = Severe acute respiratory syndrome coronavirus 2
TQSRNLQEFKPRSQ

SEQ ID NO: 16907 - protein, 13 aa, Severe acute respiratory syndrome-related coronavirus
  REGION 1..13: note = Table B: HLA-DRB1*04:04L
  source 1..13: note = Severe acute respiratory syndrome coronavirus 2
HIVYGDFSHSQLG

SEQ ID NO: 16908 - protein, 14 aa, Severe acute respiratory syndrome-related coronavirus
  REGION 1..14: note = Table B: HLA-DRB1*04:04L HLA-DQA1*01:02-B1*06:02L HLA-DPA1*01:03-B1*03:01L
  source 1..14: note = Severe acute respiratory syndrome coronavirus 2
LAKRFKESPFELED

SEQ ID NO: 16909 - protein, 12 aa, Severe acute respiratory syndrome-related coronavirus
  REGION 1..12: note = Table B: HLA-DRB1*04:04L HLA-DRB1*08:04L HLA-DRB1*08:77L HLA-DRB3*02:01L HLA-DPA1*03:01-B1*04:02L HLA-DRB1*11:03L HLA-DRB1*11:04L HLA-DRB1*14:02L HLA-DQA1*01:01-B1*05:01L HLA-DRB1*08:01L HLA-DRB1*09:01L HLA-DRB1*12:02L
  REGION 1..12: note = CONT. FROM ABOVE: HLA-DPA1*02:01-B1*13:01L HLA-DRB1*07:01L HLA-D RB1*08:03L
  source 1..12: note = Severe acute respiratory syndrome coronavirus 2
EDFIPMDSTVKN

SEQ ID NO: 16910 - protein, 13 aa, Severe acute respiratory syndrome-related coronavirus
  REGION 1..13: note = Table B: HLA-DRB1*04:04L HLA-DQA1*01:02-B1*06:02L HLA-DRB1*01:01L HLA-DPA1*03:01-B1*04:02L HLA-DRB1*03:01L HLA-DRB1*08:01L HLA-DRB1*11:01L HLA-DRB5*01:01L HLA-DRB1*13:01L HLA-DRB4*01:01L HLA-DRB1*09:01L HLA-DPA1*02:01-B1*13:01L
  REGION 1..13: note = CONT. FROM ABOVE: HLA-DPA1*01:02-B1*04:01L HLA-DRB1*07:01L HLA-D RB1*08:03L
  source 1..13: note = Severe acute respiratory syndrome coronavirus 2
KNYFITDAQTGSS

SEQ ID NO: 16911 - protein, 13 aa, Severe acute respiratory syndrome-related coronavirus
  REGION 1..13: note = Table B: HLA-DRB1*04:04L HLA-DRB1*11:02L
  source 1..13: note = Severe acute respiratory syndrome coronavirus 2
LDDFVEIIKSQDL

SEQ ID NO: 16912 - protein, 15 aa, Severe acute respiratory syndrome-related coronavirus
  REGION 1..15: note = Table B: HLA-DRB1*04:04L HLA-DRB3*02:01L HLA-DPA1*01:03-B1*03:01L HLA-DRB1*11:03L HLA-DRB1*11:04L HLA-DQA1*01:01-B1*05:01L HLA-DRB1*11:01L HLA-DQA1*05:05-B1*03:19L HLA-DRB1*04:10L
  REGION 1..15: note = CONT. FROM ABOVE: HLA-DPA1*01:03-B1*04:02L HLA-DRB3*01:01L HLA-D PA1*01:03-B1*02:01L HLA-DPA1*01:03-B1*104:01L HLA-DQA1*05:05-B1* 03:01L HLA-DRB1*07:01L
  source 1..15: note = Severe acute respiratory syndrome coronavirus 2
DGHVETFYPKLQSSQ

SEQ ID NO: 16913 - protein, 12 aa, Severe acute respiratory syndrome-related coronavirus
  REGION 1..12: note = Table B: HLA-DRB1*04:04L HLA-DPA1*02:01-B1*13:01L HLA-DRB1*07:01L
  source 1..12: note = Severe acute respiratory syndrome coronavirus 2
QNYGDSATLPKG

SEQ ID NO: 16914 - protein, 13 aa, Severe acute respiratory syndrome-related coronavirus
  REGION 1..13: note = Table B: HLA-DRB1*04:04L HLA-DRB1*01:02L HLA-DRB1*04:10L HLA-DRB1*12:01L HLA-DPA1*02:01-B1*13:01L HLA-DPA1*01:02-B1*04:01L HLA-DRB1*15:03L
  source 1..13: note = Severe acute respiratory syndrome coronavirus 2
NMRVIHFGAGSDK

SEQ ID NO: 16915 - protein, 14 aa, Severe acute respiratory syndrome-related coronavirus
  REGION 1..14: note = Table B: HLA-DRB1*04:04L HLA-DRB1*01:01L HLA-DRB1*11:01L HLA-DRB1*04:10L HLA-DRB3*01:01L HLA-DRB1*10:01L
  source 1..14: note = Severe acute respiratory syndrome coronavirus 2
LRQWLPTGTLLVDS

SEQ ID NO: 16916 - protein, 11 aa, Severe acute respiratory syndrome-related coronavirus
  REGION 1..11: note = Table B: HLA-DRB1*04:04L HLA-DRB1*03:01L HLA-DRB1*11:04L HLA-DRB1*14:02L HLA-DQA1*01:01-B1*05:01L HLA-DRB1*11:01L HLA-DPA1*01:03-B1*04:01L HLA-DRB1*09:01L HLA-DPA1*01:03-B1*04:02L HLA-DRB3*01:01L HLA-DRB1*07:01L
  REGION 1..11: note = CONT. FROM ABOVE: HLA-DRB1*10:01L HLA-DRB1*08:03L
  source 1..11: note = Severe acute respiratory syndrome coronavirus 2
YIFWRNTNPIQ

SEQ ID NO: 16917 - protein, 13 aa, Severe acute respiratory syndrome-related coronavirus
  REGION 1..13: note = Table B: HLA-DRB1*04:04L HLA-DRB1*01:01L HLA-DRB5*02:02L HLA-DRB3*01:01L HLA-DPA1*01:03-B1*104:01L
  source 1..13: note = Severe acute respiratory syndrome coronavirus 2
IFWRNTNPIQLSS

SEQ ID NO: 16918 - protein, 13 aa, Severe acute respiratory syndrome-related coronavirus
  REGION 1..13: note = Table B: HLA-DRB1*04:04L HLA-DRB1*11:03L HLA-DPA1*01:03-B1*02:01L HLA-DRB1*08:03L
  source 1..13: note = Severe acute respiratory syndrome coronavirus 2
SYSLFDMSKFPLK

SEQ ID NO: 16919 - protein, 13 aa, Severe acute respiratory syndrome-related coronavirus
  REGION 1..13: note = Table B: HLA-DRB1*04:04L HLA-DRB1*10:01L HLA-DRB1*04:08L
  source 1..13: note = Severe acute respiratory syndrome coronavirus 2
TAVMSLKEGQIND

SEQ ID NO: 16920 - protein, 14 aa, Severe acute respiratory syndrome-related coronavirus
  REGION 1..14: note = Table B: HLA-DRB1*04:04L HLA-DRB1*08:04L HLA-DPA1*01:03-B1*03:01L HLA-DRB1*08:01L HLA-DQA1*05:05-B1*03:19L HLA-DPA1*02:01-B1*13:01L HLA-DPA1*01:03-B1*104:01L HLA-DRB1*07:01L
  source 1..14: note = Severe acute respiratory syndrome coronavirus 2
INDMILSLLSKGRL

SEQ ID NO: 16921 - protein, 14 aa, Severe acute respiratory syndrome-related coronavirus
  REGION 1..14: note = Table B: HLA-DRB1*04:04L HLA-DPA1*01:03-B1*03:01L HLA-DRB1*11:04L HLA-DRB3*01:01L HLA-DPA1*02:01-B1*13:01L
  source 1..14: note = Severe acute respiratory syndrome coronavirus 2
NDMILSLLSKGRLI

SEQ ID NO: 16922 - protein, 12 aa, Severe acute respiratory syndrome-related coronavirus
  REGION 1..12: note = Table B: HLA-DRB1*04:04L HLA-DRB1*04:05L HLA-DRB1*01:02L HLA-DRB1*04:10L HLA-DRB1*07:01L
  source 1..12: note = Severe acute respiratory syndrome coronavirus 2
TTRTQLPPAYTN

SEQ ID NO: 16923 - protein, 16 aa, Severe acute respiratory syndrome-related coronavirus
  REGION 1..16: note = Table B: HLA-DRB1*04:04L HLA-DRB1*11:01L
  source 1..16: note = Severe acute respiratory syndrome coronavirus 2
LPPAYTNSFTRGVYYP

SEQ ID NO: 16924 - protein, 12 aa, Severe acute respiratory syndrome-related coronavirus
  REGION 1..12: note = Table B: HLA-DRB1*04:04L HLA-DRB1*08:04L HLA-DRB1*11:01L HLA-DRB1*04:10L HLA-DRB3*01:01L HLA-DPA1*02:01-B1*13:01L
  source 1..12: note = Severe acute respiratory syndrome coronavirus 2
RGVYYPDKVFRS

SEQ ID NO: 16925 - protein, 14 aa, Severe acute respiratory syndrome-related coronavirus
  REGION 1..14: note = Table B: HLA-DRB1*04:04L HLA-DRB1*08:04L HLA-DRB1*04:10L HLA-DQA1*05:05-B1*03:01L HLA-DRB1*04:08L
  source 1..14: note = Severe acute respiratory syndrome coronavirus 2
SSVLHSTQDLFLPF

SEQ ID NO: 16926 - protein, 15 aa, Severe acute respiratory syndrome-related coronavirus
  REGION 1..15: note = Table B: HLA-DRB1*04:04L HLA-DRB1*01:01L HLA-DPA1*03:01-B1*04:02L HLA-DRB1*03:01L HLA-DRB1*14:01L HLA-DRB1*11:01L HLA-DRB3*01:01L HLA-DRB1*07:01L
  source 1..15: note = Severe acute respiratory syndrome coronavirus 2
GTKRFDNPVLPFNDG

SEQ ID NO: 16927 - protein, 14 aa, Severe acute respiratory syndrome-related coronavirus
  REGION 1..14: note = Table B: HLA-DRB1*04:04L HLA-DRB1*03:01L HLA-DRB1*11:02L HLA-DRB1*13:01L HLA-DPA1*01:03-B1*02:01L HLA-DRB1*07:01L HLA-DRB1*08:02L
  source 1..14: note = Severe acute respiratory syndrome coronavirus 2
GVYFASTEKSNIIR

SEQ ID NO: 16928 - protein, 14 aa, Severe acute respiratory syndrome-related coronavirus
  REGION 1..14: note = Table B: HLA-DRB1*04:04L HLA-DRB1*08:04L HLA-DPA1*01:03-B1*03:01L HLA-DQA1*05:05-B1*03:19L HLA-DQA1*05:01-B1*02:01L HLA-DPA1*01:03-B1*04:01L HLA-DPA1*01:03-B1*04:02L HLA-DPA1*02:01-B1*13:01L
  REGION 1..14: note = CONT. FROM ABOVE: HLA-DPA1*01:03-B1*02:01L HLA-DPA1*01:03-B1*104 :01L HLA-DRB1*15:03L
  source 1..14: note = Severe acute respiratory syndrome coronavirus 2
IIRGWIFGTTLDSK

SEQ ID NO: 16929 - protein, 13 aa, Severe acute respiratory syndrome-related coronavirus
  REGION 1..13: note = Table B: HLA-DRB1*04:04L HLA-DRB3*02:01L HLA-DQA1*01-B1*05L HLA-DRB1*07:01L
  source 1..13: note = Severe acute respiratory syndrome coronavirus 2
FRVYSSANNCTFE

SEQ ID NO: 16930 - protein, 16 aa, Severe acute respiratory syndrome-related coronavirus
  REGION 1..16: note = Table B: HLA-DRB1*04:04L HLA-DRB1*08:04L HLA-DPA1*03:01-B1*04:02L HLA-DRB1*11:02L HLA-DRB1*11:04L HLA-DRB1*11:01L HLA-DRB3*01:01L HLA-DPA1*01:03-B1*02:01L
  source 1..16: note = Severe acute respiratory syndrome coronavirus 2
VGYLQPRTFLLKYNEN

SEQ ID NO: 16931 - protein, 16 aa, Severe acute respiratory syndrome-related coronavirus
  REGION 1..16: note = Table B: HLA-DRB1*04:04L HLA-DRB1*11:02L HLA-DRB1*11:03L HLA-DQA1*05:05-B1*03:116L HLA-DPA1*01:03-B1*04:02L HLA-DRB3*01:01L HLA-DPA1*01:03-B1*104:01L HLA-DRB1*07:01L HLA-DRB1*08:02L
  source 1..16: note = Severe acute respiratory syndrome coronavirus 2
QPRTFLLKYNENGTIT

SEQ ID NO: 16932 - protein, 13 aa, Severe acute respiratory syndrome-related coronavirus
  REGION 1..13: note = Table B: HLA-DRB1*04:04L HLA-DQA1*01:02-B1*06:02L HLA-DPA1*03:01-B1*04:02L HLA-DRB1*11:04L HLA-DRB1*08:01L HLA-DRB1*09:01L HLA-DPA1*02:01-B1*13:01L HLA-DRB1*10:01L HLA-DQA1*01:03-B1*06:01L HLA-DRB1*04:08L HLA-DRB1*08:03L
  source 1..13: note = Severe acute respiratory syndrome coronavirus 2
LLKYNENGTITDA

SEQ ID NO: 16933 - protein, 14 aa, Severe acute respiratory syndrome-related coronavirus
  REGION 1..14: note = Table B: HLA-DRB1*04:04L HLA-DRB1*16:01L HLA-DRB1*04:08L
  source 1..14: note = Severe acute respiratory syndrome coronavirus 2
TDAVDCALDPLSET

SEQ ID NO: 16934 - protein, 11 aa, Severe acute respiratory syndrome-related coronavirus
  REGION 1..11: note = Table B: HLA-DRB1*04:04L HLA-DRB1*08:01L HLA-DPA1*03:01-B1*105:01L
  source 1..11: note = Severe acute respiratory syndrome coronavirus 2
ESIVRFPNITN

SEQ ID NO: 16935 - protein, 15 aa, Severe acute respiratory syndrome-related coronavirus
  REGION 1..15: note = Table B: HLA-DRB1*04:04L HLA-DPA1*01:03-B1*04:02L HLA-DQA1*05:05-B1*03:01L HLA-DRB1*07:01L HLA-DQA1*01:03-B1*06:01L HLA-DRB1*04:08L
  source 1..15: note = Severe acute respiratory syndrome coronavirus 2
SPTKLNDLCFTNVYA

SEQ ID NO: 16936 - protein, 13 aa, Severe acute respiratory syndrome-related coronavirus
  REGION 1..13: note = Table B: HLA-DRB1*04:04L HLA-DRB1*04:05L HLA-DRB1*08:04L HLA-DRB1*08:77L HLA-DRB3*02:01L HLA-DPA1*01:03-B1*03:01L HLA-DRB1*11:03L HLA-DRB1*04:10L HLA-DRB1*12:02L HLA-DRB1*07:01L HLA-DRB1*04:08L
  source 1..13: note = Severe acute respiratory syndrome coronavirus 2
VRQIAPGQTGKIA

SEQ ID NO: 16937 - protein, 14 aa, Severe acute respiratory syndrome-related coronavirus
  REGION 1..14: note = Table B: HLA-DRB1*04:04L HLA-DRB3*01:01L HLA-DRB1*08:03L
  source 1..14: note = Severe acute respiratory syndrome coronavirus 2
IADYNYKLPDDFTG

SEQ ID NO: 16938 - protein, 14 aa, Severe acute respiratory syndrome-related coronavirus
  REGION 1..14: note = Table B: HLA-DRB1*04:04L
  source 1..14: note = Severe acute respiratory syndrome coronavirus 2
NSNNLDSKVGGNYN

SEQ ID NO: 16939 - protein, 14 aa, Severe acute respiratory syndrome-related coronavirus
  REGION 1..14: note = Table B: HLA-DRB1*04:04L HLA-DRB1*03:01L HLA-DRB1*11:02L HLA-DRB1*13:01L HLA-DPA1*02:01-B1*13:01L HLA-DPA1*01:02-B1*04:01L
  source 1..14: note = Severe acute respiratory syndrome coronavirus 2
KSNLKPFERDISTE

SEQ ID NO: 16940 - protein, 15 aa, Severe acute respiratory syndrome-related coronavirus
  REGION 1..15: note = Table B: HLA-DRB1*04:04L HLA-DQA1*01:01-B1*05:01L HLA-DRB1*08:01L
  source 1..15: note = Severe acute respiratory syndrome coronavirus 2
ERDISTEIYQAGSTP

SEQ ID NO: 16941 - protein, 14 aa, Severe acute respiratory syndrome-related coronavirus
  REGION 1..14: note = Table B: HLA-DRB1*04:04L HLA-DRB3*01:01L
  source 1..14: note = Severe acute respiratory syndrome coronavirus 2
RDIADTTDAVRDPQ

SEQ ID NO: 16942 - protein, 15 aa, Severe acute respiratory syndrome-related coronavirus
  REGION 1..15: note = Table B: HLA-DRB1*04:04L HLA-DPA1*03:01-B1*105:01L HLA-DRB1*10:01L HLA-DRB1*15:03L
  source 1..15: note = Severe acute respiratory syndrome coronavirus 2
VSVITPGTNTSNQVA

SEQ ID NO: 16943 - protein, 18 aa, Severe acute respiratory syndrome-related coronavirus
  REGION 1..18: note = Table B: HLA-DRB1*04:04L HLA-DRB1*11:01L HLA-DRB1*09:01L HLA-DRB1*07:01L HLA-DRB1*08:03L
  source 1..18: note = Severe acute respiratory syndrome coronavirus 2
TPGTNTSNQVAVLYQDVN

SEQ ID NO: 16944 - protein, 12 aa, Severe acute respiratory syndrome-related coronavirus
  REGION 1..12: note = Table B: HLA-DRB1*04:04L HLA-DQA1*01:02-B1*06:02L HLA-DRB1*14:01L HLA-DQA1*01:03-B1*06:01L HLA-DRB1*15:03L
  source 1..12: note = Severe acute respiratory syndrome coronavirus 2
SYQTQTNSPRRA

SEQ ID NO: 16945 - protein, 13 aa, Severe acute respiratory syndrome-related coronavirus
  REGION 1..13: note = Table B: HLA-DRB1*04:04L HLA-DRB1*04:05L HLA-DRB1*01:02L HLA-DRB4*03:01NL HLA-DPA1*03:01-B1*04:02L HLA-DRB1*14:01L HLA-DQA1*01-B1*05L HLA-DQA1*05:01-B1*02:01L HLA-DRB1*04:10L HLA-DPA1*03:01-B1*105:01L HLA-DRB1*14:54L HLA-DRB1*16:01L
  REGION 1..13: note = CONT. FROM ABOVE: HLA-DRB1*04:08L
  source 1..13: note = Severe acute respiratory syndrome coronavirus 2
QSIIAYTMSLGAE

SEQ ID NO: 16946 - protein, 13 aa, Severe acute respiratory syndrome-related coronavirus
  REGION 1..13: note = Table B: HLA-DRB1*04:04L HLA-DRB1*01:02L HLA-DRB1*08:04L HLA-DRB1*08:77L HLA-DRB3*02:01L HLA-DPA1*01:03-B1*03:01L HLA-DRB1*14:01L HLA-DRB1*11:03L HLA-DRB1*11:04L HLA-DRB1*14:02L HLA-DQA1*01:01-B1*05:01L HLA-DRB1*08:01L HLA-DRB1*11:01L
  REGION 1..13: note = CONT. FROM ABOVE: HLA-DRB5*01:01L HLA-DQA1*05:05-B1*03:116L HLA- DRB1*09:01L HLA-DPA1*01:03-B1*04:02L HLA-DRB1*12:02L HLA-DPA1*02 :01-B1*13:01L HLA-DPA1*01:03-B1*104:01L HLA-DRB1*07:01L HLA-DRB1 *10:01L HLA-DRB1*04:08L HLA-DRB1*15:03L
  source 1..13: note = Severe acute respiratory syndrome coronavirus 2
VAYSNNSIAIPTN

SEQ ID NO: 16947 - protein, 14 aa, Severe acute respiratory syndrome-related coronavirus
  REGION 1..14: note = Table B: HLA-DRB1*04:04L HLA-DRB1*01:01L HLA-DRB3*02:01L HLA-DRB1*04:10L HLA-DRB1*07:01L HLA-DRB1*10:01L HLA-DRB1*04:08L
  source 1..14: note = Severe acute respiratory syndrome coronavirus 2
TQLNRALTGIAVEQ

SEQ ID NO: 16948 - protein, 14 aa, Severe acute respiratory syndrome-related coronavirus
  REGION 1..14: note = Table B: HLA-DRB1*04:04L HLA-DRB1*07:01L
  source 1..14: note = Severe acute respiratory syndrome coronavirus 2
QLNRALTGIAVEQD

SEQ ID NO: 16949 - protein, 15 aa, Severe acute respiratory syndrome-related coronavirus
  REGION 1..15: note = Table B: HLA-DRB1*04:04L HLA-DRB1*08:04L HLA-DRB1*11:03L HLA-DRB1*11:01L HLA-DRB1*07:01L
  source 1..15: note = Severe acute respiratory syndrome coronavirus 2
QEVFAQVKQIYKTPP

SEQ ID NO: 16950 - protein, 12 aa, Severe acute respiratory syndrome-related coronavirus
  REGION 1..12: note = Table B: HLA-DRB1*04:04L HLA-DRB1*08:01L HLA-DRB1*04:10L HLA-DPA1*02:01-B1*13:01L HLA-DRB1*14:54L
  source 1..12: note = Severe acute respiratory syndrome coronavirus 2
VKQIYKTPPIKD

SEQ ID NO: 16951 - protein, 14 aa, Severe acute respiratory syndrome-related coronavirus
  REGION 1..14: note = Table B: HLA-DRB1*04:04L
  source 1..14: note = Severe acute respiratory syndrome coronavirus 2
KQIYKTPPIKDFGG

SEQ ID NO: 16952 - protein, 14 aa, Severe acute respiratory syndrome-related coronavirus
  REGION 1..14: note = Table B: HLA-DRB1*04:04L HLA-DRB1*08:77L HLA-DRB1*03:01L HLA-DRB1*11:01L HLA-DRB1*04:10L HLA-DRB3*01:01L HLA-DPA1*01:03-B1*02:01L HLA-DRB1*07:01L HLA-DRB1*10:01L HLA-DRB1*08:02L HLA-DRB1*08:03L
  source 1..14: note = Severe acute respiratory syndrome coronavirus 2
IEDLLFNKVTLADA

SEQ ID NO: 16953 - protein, 13 aa, Severe acute respiratory syndrome-related coronavirus
  REGION 1..13: note = Table B: HLA-DRB1*04:04L HLA-DRB1*08:04L HLA-DPA1*03:01-B1*04:02L HLA-DRB1*11:04L HLA-DRB1*14:02L HLA-DRB1*08:01L HLA-DRB3*01:01L HLA-DPA1*01:03-B1*104:01L HLA-DPA1*01:02-B1*04:01L HLA-DRB1*10:01L HLA-DRB1*08:03L
  source 1..13: note = Severe acute respiratory syndrome coronavirus 2
FNKVTLADAGFIK

SEQ ID NO: 16954 - protein, 13 aa, Severe acute respiratory syndrome-related coronavirus
  REGION 1..13: note = Table B: HLA-DRB1*04:04L HLA-DRB1*01:01L HLA-DPA1*01:02-B1*04:01L HLA-DRB1*10:01L
  source 1..13: note = Severe acute respiratory syndrome coronavirus 2
NKVTLADAGFIKQ

SEQ ID NO: 16955 - protein, 14 aa, Severe acute respiratory syndrome-related coronavirus
  REGION 1..14: note = Table B: HLA-DRB1*04:04L HLA-DPA1*01:03-B1*104:01L HLA-DPA1*01:02-B1*04:01L HLA-DRB1*07:01L HLA-DRB1*16:01L HLA-DRB1*04:08L HLA-DRB1*15:03L
  source 1..14: note = Severe acute respiratory syndrome coronavirus 2
IAARDLICAQKFNG

SEQ ID NO: 16956 - protein, 13 aa, Severe acute respiratory syndrome-related coronavirus
  REGION 1..13: note = Table B: HLA-DRB1*04:04L HLA-DRB1*04:05L HLA-DRB1*01:02L HLA-DRB4*03:01NL HLA-DQA1*05:01-B1*02:01L HLA-DRB1*04:10L HLA-DRB1*12:01L HLA-DRB1*14:54L HLA-DRB1*16:01L HLA-DRB1*04:08L
  source 1..13: note = Severe acute respiratory syndrome coronavirus 2
AGTITSGWTFGAG

SEQ ID NO: 16957 - protein, 14 aa, Severe acute respiratory syndrome-related coronavirus
  REGION 1..14: note = Table B: HLA-DRB1*04:04L HLA-DRB3*02:01L HLA-DPA1*03:01-B1*04:02L HLA-DRB1*08:01L HLA-DPA1*02:01-B1*13:01L HLA-DRB1*07:01L
  source 1..14: note = Severe acute respiratory syndrome coronavirus 2
GIGVTQNVLYENQK

SEQ ID NO: 16958 - protein, 13 aa, Severe acute respiratory syndrome-related coronavirus
  REGION 1..13: note = Table B: HLA-DRB1*04:04L HLA-DRB1*11:01L HLA-DPA1*02:01-B1*13:01L
  source 1..13: note = Severe acute respiratory syndrome coronavirus 2
QNVLYENQKLIAN

SEQ ID NO: 16959 - protein, 13 aa, Severe acute respiratory syndrome-related coronavirus
  REGION 1..13: note = Table B: HLA-DRB1*04:04L HLA-DRB1*11:02L HLA-DQA1*05:05-B1*03:116L HLA-DPA1*02:01-B1*13:01L HLA-DRB1*10:01L HLA-DRB1*08:02L
  source 1..13: note = Severe acute respiratory syndrome coronavirus 2
NVLYENQKLIANQ

SEQ ID NO: 16960 - protein, 13 aa, Severe acute respiratory syndrome-related coronavirus
  REGION 1..13: note = Table B: HLA-DRB1*04:04L HLA-DRB1*11:03L HLA-DRB1*11:04L HLA-DRB1*14:02L HLA-DQA1*01:01-B1*05:01L HLA-DPA1*01:03-B1*04:02L HLA-DRB1*07:01L HLA-DRB1*10:01L HLA-DRB1*08:03L
  source 1..13: note = Severe acute respiratory syndrome coronavirus 2
ANQFNSAIGKIQD

SEQ ID NO: 16961 - protein, 12 aa, Severe acute respiratory syndrome-related coronavirus
  REGION 1..12: note = Table B: HLA-DRB1*04:04L
  source 1..12: note = Severe acute respiratory syndrome coronavirus 2
NSAIGKIQDSLS

SEQ ID NO: 16962 - protein, 12 aa, Severe acute respiratory syndrome-related coronavirus
  REGION 1..12: note = Table B: HLA-DRB1*04:04L HLA-DRB1*08:04L HLA-DRB1*11:04L HLA-DRB1*10:01L
  source 1..12: note = Severe acute respiratory syndrome coronavirus 2
SAIGKIQDSLSS

SEQ ID NO: 16963 - protein, 12 aa, Severe acute respiratory syndrome-related coronavirus
  REGION 1..12: note = Table B: HLA-DRB1*04:04L HLA-DRB1*04:05L HLA-DRB1*01:02L HLA-DPA1*01:03-B1*03:01L HLA-DRB1*04:10L HLA-DPA1*01:03-B1*04:02L HLA-DRB1*04:08L HLA-DRB1*15:03L
  source 1..12: note = Severe acute respiratory syndrome coronavirus 2
LSSTASALGKLQ

SEQ ID NO: 16964 - protein, 13 aa, Severe acute respiratory syndrome-related coronavirus
  REGION 1..13: note = Table B: HLA-DRB1*04:04L
  source 1..13: note = Severe acute respiratory syndrome coronavirus 2
ASALGKLQDVVNQ

SEQ ID NO: 16965 - protein, 12 aa, Severe acute respiratory syndrome-related coronavirus
  REGION 1..12: note = Table B: HLA-DRB1*04:04L HLA-DQA1*01:02-B1*06:02L HLA-DRB1*01:02L HLA-DQA1*01:01-B1*05:01L HLA-DRB1*12:01L HLA-DPA1*02:01-B1*13:01L HLA-DRB1*04:08L
  source 1..12: note = Severe acute respiratory syndrome coronavirus 2
GKLQDVVNQNAQ

SEQ ID NO: 16966 - protein, 14 aa, Severe acute respiratory syndrome-related coronavirus
  REGION 1..14: note = Table B: HLA-DRB1*04:04L HLA-DRB1*08:01L HLA-DPA1*01:03-B1*04:02L HLA-DPA1*02:01-B1*13:01L HLA-DPA1*01:03-B1*104:01L
  source 1..14: note = Severe acute respiratory syndrome coronavirus 2
VVNQNAQALNTLVK

SEQ ID NO: 16967 - protein, 13 aa, Severe acute respiratory syndrome-related coronavirus
  REGION 1..13: note = Table B: HLA-DRB1*04:04L HLA-DRB3*02:01L
  source 1..13: note = Severe acute respiratory syndrome coronavirus 2
QSLQTYVTQQLIR

SEQ ID NO: 16968 - protein, 13 aa, Severe acute respiratory syndrome-related coronavirus
  REGION 1..13: note = Table B: HLA-DRB1*04:04L
  source 1..13: note = Severe acute respiratory syndrome coronavirus 2
SLQTYVTQQLIRA

SEQ ID NO: 16969 - protein, 13 aa, Severe acute respiratory syndrome-related coronavirus
  REGION 1..13: note = Table B: HLA-DRB1*04:04L HLA-DRB1*08:04L HLA-DPA1*01:03-B1*03:01L HLA-DPA1*01:03-B1*04:01L HLA-DRB1*04:10L HLA-DPA1*01:03-B1*04:02L HLA-DRB1*14:54L HLA-DPA1*01:03-B1*02:01L HLA-DRB1*10:01L
  source 1..13: note = Severe acute respiratory syndrome coronavirus 2
LQTYVTQQLIRAA

SEQ ID NO: 16970 - protein, 14 aa, Severe acute respiratory syndrome-related coronavirus
  REGION 1..14: note = Table B: HLA-DRB1*04:04L
  source 1..14: note = Severe acute respiratory syndrome coronavirus 2
VVFLHVTYVPAQEK

SEQ ID NO: 16971 - protein, 13 aa, Severe acute respiratory syndrome-related coronavirus
  REGION 1..13: note = Table B: HLA-DRB1*04:04L HLA-DPA1*01:03-B1*03:01L
  source 1..13: note = Severe acute respiratory syndrome coronavirus 2
FLHVTYVPAQEKN

SEQ ID NO: 16972 - protein, 14 aa, Severe acute respiratory syndrome-related coronavirus
  REGION 1..14: note = Table B: HLA-DRB1*04:04L HLA-DPA1*01:03-B1*104:01L
  source 1..14: note = Severe acute respiratory syndrome coronavirus 2
LHVTYVPAQEKNFT

SEQ ID NO: 16973 - protein, 14 aa, Severe acute respiratory syndrome-related coronavirus
  REGION 1..14: note = Table B: HLA-DRB1*04:04L
  source 1..14: note = Severe acute respiratory syndrome coronavirus 2
HVTYVPAQEKNFTT

SEQ ID NO: 16974 - protein, 17 aa, Severe acute respiratory syndrome-related coronavirus
  REGION 1..17: note = Table B: HLA-DRB1*04:04L
  source 1..17: note = Severe acute respiratory syndrome coronavirus 2
FPREGVFVSNGTHWFVT

SEQ ID NO: 16975 - protein, 12 aa, Severe acute respiratory syndrome-related coronavirus
  REGION 1..12: note = Table B: HLA-DRB1*04:04L HLA-DRB1*08:04L HLA-DRB1*11:04L HLA-DRB1*04:10L HLA-DRB1*04:08L
  source 1..12: note = Severe acute respiratory syndrome coronavirus 2
DVVIGIVNNTVY

SEQ ID NO: 16976 - protein, 12 aa, Severe acute respiratory syndrome-related coronavirus
  REGION 1..12: note = Table B: HLA-DRB1*04:04L HLA-DRB1*04:08L
  source 1..12: note = Severe acute respiratory syndrome coronavirus 2
VVIGIVNNTVYD

SEQ ID NO: 16977 - protein, 13 aa, Severe acute respiratory syndrome-related coronavirus
  REGION 1..13: note = Table B: HLA-DRB1*04:04L HLA-DRB1*08:04L HLA-DRB1*11:03L HLA-DPA1*02:01-B1*13:01L HLA-DQA1*05:05-B1*03:01L HLA-DRB1*04:08L
  source 1..13: note = Severe acute respiratory syndrome coronavirus 2
VIGIVNNTVYDPL

SEQ ID NO: 16978 - protein, 14 aa, Severe acute respiratory syndrome-related coronavirus
  REGION 1..14: note = Table B: HLA-DRB1*04:04L HLA-DRB1*08:04L HLA-DRB1*08:77L HLA-DRB3*02:01L HLA-DRB1*14:01L HLA-DRB1*11:03L HLA-DRB1*14:02L HLA-DRB1*08:01L HLA-DPA1*01:03-B1*04:01L HLA-DPA1*01:03-B1*04:02L HLA-DRB1*12:02L
  REGION 1..14: note = CONT. FROM ABOVE: HLA-DPA1*01:03-B1*104:01L HLA-DRB1*07:01L HLA- DRB1*08:03L
  source 1..14: note = Severe acute respiratory syndrome coronavirus 2
GIVNNTVYDPLQPE

SEQ ID NO: 16979 - protein, 12 aa, Severe acute respiratory syndrome-related coronavirus
  REGION 1..12: note = Table B: HLA-DRB1*04:04L HLA-DRB1*08:04L HLA-DRB1*11:03L HLA-DRB1*11:04L HLA-DRB5*01:01L HLA-DRB1*12:02L
  source 1..12: note = Severe acute respiratory syndrome coronavirus 2
TVYDPLQPELDS

SEQ ID NO: 16980 - protein, 12 aa, Severe acute respiratory syndrome-related coronavirus
  REGION 1..12: note = Table B: HLA-DRB1*04:04L HLA-DRB1*11:04L HLA-DRB1*11:01L HLA-DRB3*01:01L HLA-DRB1*08:03L
  source 1..12: note = Severe acute respiratory syndrome coronavirus 2
KYFKNHTSPDVD

SEQ ID NO: 16981 - protein, 13 aa, Severe acute respiratory syndrome-related coronavirus
  REGION 1..13: note = Table B: HLA-DRB1*04:04L HLA-DRB4*03:01NL HLA-DRB1*11:03L HLA-DRB1*11:04L HLA-DRB1*11:01L HLA-DRB1*04:10L HLA-DRB3*01:01L HLA-DPA1*01:03-B1*104:01L HLA-DRB1*08:03L
  source 1..13: note = Severe acute respiratory syndrome coronavirus 2
IDRLNEVAKNLNE

SEQ ID NO: 16982 - protein, 15 aa, Severe acute respiratory syndrome-related coronavirus
  REGION 1..15: note = Table B: HLA-DRB1*04:04L HLA-DRB1*08:04L HLA-DPA1*01:03-B1*04:02L
  source 1..15: note = Severe acute respiratory syndrome coronavirus 2
VAKNLNESLIDLQEL

SEQ ID NO: 16983 - protein, 14 aa, Severe acute respiratory syndrome-related coronavirus
  REGION 1..14: note = Table B: HLA-DRB1*04:04L HLA-DQA1*01:01-B1*05:01L
  source 1..14: note = Severe acute respiratory syndrome coronavirus 2
NESLIDLQELGKYE

SEQ ID NO: 16984 - protein, 15 aa, Severe acute respiratory syndrome-related coronavirus
  REGION 1..15: note = Table B: HLA-DRB1*04:04L HLA-DPA1*01:03-B1*03:01L HLA-DPA1*01:03-B1*04:02L
  source 1..15: note = Severe acute respiratory syndrome coronavirus 2
TVTLKQGEIKDATPS

SEQ ID NO: 16985 - protein, 13 aa, Severe acute respiratory syndrome-related coronavirus
  REGION 1..13: note = Table B: HLA-DRB1*04:04L HLA-DRB1*08:01L HLA-DRB1*04:10L HLA-DRB1*14:54L
  source 1..13: note = Severe acute respiratory syndrome coronavirus 2
GEIKDATPSDFVR

SEQ ID NO: 16986 - protein, 11 aa, Severe acute respiratory syndrome-related coronavirus
  REGION 1..11: note = Table B: HLA-DRB1*04:04L HLA-DRB1*01:01L HLA-DRB1*08:04L HLA-DRB1*14:02L HLA-DRB1*08:01L HLA-DRB1*11:01L HLA-DPA1*01:03-B1*04:02L HLA-DPA1*01:03-B1*104:01L HLA-DRB1*10:01L HLA-DRB1*08:03L
  source 1..11: note = Severe acute respiratory syndrome coronavirus 2
FVRATATIPIQ

SEQ ID NO: 16987 - protein, 14 aa, Severe acute respiratory syndrome-related coronavirus
  REGION 1..14: note = Table B: HLA-DRB1*04:04L HLA-DRB1*01:01L
  source 1..14: note = Severe acute respiratory syndrome coronavirus 2
LAVFQSASKIITLK

SEQ ID NO: 16988 - protein, 17 aa, Severe acute respiratory syndrome-related coronavirus
  REGION 1..17: note = Table B: HLA-DRB1*04:04L HLA-DPA1*01:03-B1*104:01L
  source 1..17: note = Severe acute respiratory syndrome coronavirus 2
IPYNSVTSSIVITSGDG

SEQ ID NO: 16989 - protein, 13 aa, Severe acute respiratory syndrome-related coronavirus
  REGION 1..13: note = Table B: HLA-DRB1*04:04L HLA-DRB1*04:05L HLA-DRB1*11:03L HLA-DRB1*14:02L HLA-DRB1*15:01L
  source 1..13: note = Severe acute respiratory syndrome coronavirus 2
DYYQLYSTQLSTD

SEQ ID NO: 16990 - protein, 16 aa, Severe acute respiratory syndrome-related coronavirus
  REGION 1..16: note = Table B: HLA-DRB1*04:04L HLA-DRB1*09:01L HLA-DRB1*07:01L
  source 1..16: note = Severe acute respiratory syndrome coronavirus 2
SGVVNPVMEPIYDEPT

SEQ ID NO: 16991 - protein, 13 aa, Severe acute respiratory syndrome-related coronavirus
  REGION 1..13: note = Table B: HLA-DRB1*04:04L HLA-DQA1*03:01-B1*03:02L HLA-DRB1*16:01L HLA-DRB1*04:08L HLA-DRB1*15:03L
  source 1..13: note = Severe acute respiratory syndrome coronavirus 2
PVMEPIYDEPTTT

SEQ ID NO: 16992 - protein, 14 aa, Severe acute respiratory syndrome-related coronavirus
  REGION 1..14: note = Table B: HLA-DRB1*04:04L HLA-DRB1*01:01L HLA-DRB3*02:01L HLA-DPA1*01:03-B1*03:01L HLA-DRB1*11:02L HLA-DRB1*11:03L HLA-DRB1*14:02L HLA-DQA1*05:05-B1*03:19L HLA-DQA1*05:05-B1*03:116L HLA-DPA1*01:03-B1*104:01L
  REGION 1..14: note = CONT. FROM ABOVE: HLA-DQA1*05:05-B1*03:01L HLA-DRB1*07:01L HLA-D RB1*10:01L HLA-DRB1*08:02L
  source 1..14: note = Severe acute respiratory syndrome coronavirus 2
KPSFYVYSRVKNLN

SEQ ID NO: 16993 - protein, 14 aa, Severe acute respiratory syndrome-related coronavirus
  REGION 1..14: note = Table B: HLA-DRB1*04:04L HLA-DPA1*02:01-B1*13:01L HLA-DQA1*02:01-B1*03:03L
  source 1..14: note = Severe acute respiratory syndrome coronavirus 2
VYSRVKNLNSSRVP

SEQ ID NO: 16994 - protein, 14 aa, Severe acute respiratory syndrome-related coronavirus
  REGION 1..14: note = Table B: HLA-DRB1*04:04L
  source 1..14: note = Severe acute respiratory syndrome coronavirus 2
ADSNGTITVEELKK

SEQ ID NO: 16995 - protein, 14 aa, Severe acute respiratory syndrome-related coronavirus
  REGION 1..14: note = Table B: HLA-DRB1*04:04L HLA-DRB1*11:03L
  source 1..14: note = Severe acute respiratory syndrome coronavirus 2
GTITVEELKKLLEQ

SEQ ID NO: 16996 - protein, 14 aa, Severe acute respiratory syndrome-related coronavirus
  REGION 1..14: note = Table B: HLA-DRB1*04:04L HLA-DRB1*13:01L HLA-DPA1*01:03-B1*02:01L
  source 1..14: note = Severe acute respiratory syndrome coronavirus 2
TRSMWSFNPETNIL

SEQ ID NO: 16997 - protein, 16 aa, Severe acute respiratory syndrome-related coronavirus
  REGION 1..16: note = Table B: HLA-DRB1*04:04L HLA-DRB1*03:01L HLA-DRB1*11:02L HLA-DRB1*11:03L HLA-DRB1*11:04L HLA-DRB1*11:01L HLA-DRB4*01:01L HLA-DRB1*09:01L HLA-DRB3*01:01L HLA-DRB1*07:01L HLA-DRB1*10:01L
  source 1..16: note = Severe acute respiratory syndrome coronavirus 2
NPETNILLNVPLHGTI

SEQ ID NO: 16998 - protein, 16 aa, Severe acute respiratory syndrome-related coronavirus
  REGION 1..16: note = Table B: HLA-DRB1*04:04L HLA-DRB1*08:04L HLA-DRB3*01:01L HLA-DPA1*02:01-B1*13:01L
  source 1..16: note = Severe acute respiratory syndrome coronavirus 2
ESELVIGAVILRGHLR

SEQ ID NO: 16999 - protein, 14 aa, Severe acute respiratory syndrome-related coronavirus
  REGION 1..14: note = Table B: HLA-DRB1*04:04L HLA-DRB1*08:01L HLA-DRB3*01:01L
  source 1..14: note = Severe acute respiratory syndrome coronavirus 2
EITVATSRTLSYYK

SEQ ID NO: 17000 - protein, 14 aa, Severe acute respiratory syndrome-related coronavirus
  REGION 1..14: note = Table B: HLA-DRB1*04:04L HLA-DRB3*01:01L
  source 1..14: note = Severe acute respiratory syndrome coronavirus 2
SRTLSYYKLGASQR

SEQ ID NO: 17001 - protein, 14 aa, Severe acute respiratory syndrome-related coronavirus
  REGION 1..14: note = Table B: HLA-DRB1*04:04L HLA-DPA1*01:03-B1*04:02L HLA-DRB3*01:01L HLA-DPA1*02:01-B1*13:01L HLA-DPA1*01:03-B1*104:01L HLA-DRB1*08:02L HLA-DRB1*08:03L
  source 1..14: note = Severe acute respiratory syndrome coronavirus 2
YKLGASQRVAGDSG

SEQ ID NO: 17002 - protein, 14 aa, Severe acute respiratory syndrome-related coronavirus
  REGION 1..14: note = Table B: HLA-DRB1*04:04L HLA-DQA1*01-B1*05L HLA-DPA1*01:03-B1*02:01L HLA-DQA1*05:05-B1*03:01L HLA-DRB1*07:01L
  source 1..14: note = Severe acute respiratory syndrome coronavirus 2
IIMRTFKVSIWNLD

SEQ ID NO: 17003 - protein, 14 aa, Severe acute respiratory syndrome-related coronavirus
  REGION 1..14: note = Table B: HLA-DRB1*04:04L HLA-DRB1*03:01L HLA-DRB1*11:04L HLA-DRB1*08:01L HLA-DRB1*11:01L HLA-DRB3*01:01L HLA-DPA1*01:03-B1*02:01L HLA-DRB1*10:01L HLA-DRB1*08:02L
  source 1..14: note = Severe acute respiratory syndrome coronavirus 2
NLDYIINLIIKNLS

SEQ ID NO: 17004 - protein, 15 aa, Severe acute respiratory syndrome-related coronavirus
  REGION 1..15: note = Table B: HLA-DRB1*04:04L HLA-DRB1*14:01L HLA-DRB1*11:02L HLA-DRB1*10:01L HLA-DRB1*08:03L
  source 1..15: note = Severe acute respiratory syndrome coronavirus 2
ADNKFALTCFSTQFA

SEQ ID NO: 17005 - protein, 14 aa, Severe acute respiratory syndrome-related coronavirus
  REGION 1..14: note = Table B: HLA-DRB1*04:04L HLA-DRB1*08:04L HLA-DRB3*02:01L HLA-DRB1*08:01L HLA-DRB1*04:08L
  source 1..14: note = Severe acute respiratory syndrome coronavirus 2
FIRQEEVQELYSPI

SEQ ID NO: 17006 - protein, 11 aa, Severe acute respiratory syndrome-related coronavirus
  REGION 1..11: note = Table B: HLA-DRB1*04:04L HLA-DRB1*04:05L HLA-DQA1*01:02-B1*06:02L HLA-DRB1*01:02L HLA-DRB4*03:01NL HLA-DRB1*04:10L HLA-DRB1*12:01L HLA-DRB1*14:54L HLA-DRB1*16:01L HLA-DRB1*04:08L HLA-DQA1*02:01-B1*03:03L
  source 1..11: note = Severe acute respiratory syndrome coronavirus 2
LGIITTVAAFH

SEQ ID NO: 17007 - protein, 11 aa, Severe acute respiratory syndrome-related coronavirus
  REGION 1..11: note = Table B: HLA-DRB1*04:04L HLA-DRB1*01:02L HLA-DRB1*14:01L HLA-DQA1*05:01-B1*02:01L HLA-DRB1*04:08L
  source 1..11: note = Severe acute respiratory syndrome coronavirus 2
GIITTVAAFHQ

SEQ ID NO: 17008 - protein, 11 aa, Severe acute respiratory syndrome-related coronavirus
  REGION 1..11: note = Table B: HLA-DRB1*04:04L HLA-DRB1*08:04L HLA-DRB1*08:77L HLA-DRB3*02:01L HLA-DPA1*03:01-B1*04:02L HLA-DRB1*11:03L HLA-DRB1*11:04L HLA-DRB1*14:02L HLA-DRB1*08:01L HLA-DRB5*01:01L HLA-DPA1*01:03-B1*04:01L HLA-DRB1*09:01L
  REGION 1..11: note = CONT. FROM ABOVE: HLA-DPA1*01:03-B1*04:02L HLA-DRB1*12:02L HLA-D PA1*02:01-B1*13:01L HLA-DPA1*01:03-B1*02:01L HLA-DPA1*01:03-B1*1 04:01L HLA-DRB1*07:01L HLA-DRB1*10:01L HLA-DRB1*08:03L
  source 1..11: note = Severe acute respiratory syndrome coronavirus 2
IITTVAAFHQE

SEQ ID NO: 17009 - protein, 13 aa, Severe acute respiratory syndrome-related coronavirus
  REGION 1..13: note = Table B: HLA-DRB1*04:04L HLA-DRB1*04:05L HLA-DRB1*01:02L HLA-DRB1*04:08L
  source 1..13: note = Severe acute respiratory syndrome coronavirus 2
PLIELCVDEAGSK

SEQ ID NO: 17010 - protein, 13 aa, Severe acute respiratory syndrome-related coronavirus
  REGION 1..13: note = Table B: HLA-DRB1*04:04L HLA-DRB1*08:04L HLA-DRB1*08:01L HLA-DRB1*04:10L HLA-DRB1*12:02L
  source 1..13: note = Severe acute respiratory syndrome coronavirus 2
SKSPIQYIDIGNY

SEQ ID NO: 17011 - protein, 15 aa, Severe acute respiratory syndrome-related coronavirus
  REGION 1..15: note = Table B: HLA-DRB1*04:04L HLA-DPA1*01:03-B1*03:01L HLA-DQA1*02:01-B1*03:03L
  source 1..15: note = Severe acute respiratory syndrome coronavirus 2
SKQRRPQGLPNNTAS

SEQ ID NO: 17012 - protein, 13 aa, Severe acute respiratory syndrome-related coronavirus
  REGION 1..13: note = Table B: HLA-DRB1*04:04L HLA-DRB1*14:01L HLA-DRB1*11:04L HLA-DRB1*11:01L HLA-DPA1*02:01-B1*13:01L HLA-DRB1*15:03L
  source 1..13: note = Severe acute respiratory syndrome coronavirus 2
TASWFTALTQHGK

SEQ ID NO: 17013 - protein, 11 aa, Severe acute respiratory syndrome-related coronavirus
  REGION 1..11: note = Table B: HLA-DRB1*04:04L HLA-DRB1*01:01L HLA-DRB1*08:04L HLA-DRB1*08:77L HLA-DRB3*02:01L HLA-DPA1*01:03-B1*03:01L HLA-DPA1*03:01-B1*04:02L HLA-DRB1*11:03L HLA-DRB1*11:04L HLA-DRB1*14:02L HLA-DRB1*11:01L HLA-DPA1*01:03-B1*04:02L
  REGION 1..11: note = CONT. FROM ABOVE: HLA-DRB1*12:02L HLA-DPA1*02:01-B1*13:01L HLA-D RB1*07:01L HLA-DRB1*10:01L HLA-DRB1*08:03L
  source 1..11: note = Severe acute respiratory syndrome coronavirus 2
FTALTQHGKED

SEQ ID NO: 17014 - protein, 15 aa, Severe acute respiratory syndrome-related coronavirus
  REGION 1..15: note = Table B: HLA-DRB1*04:04L HLA-DRB1*01:01L HLA-DRB1*08:04L HLA-DRB1*08:77L HLA-DRB3*02:01L HLA-DRB1*11:03L HLA-DRB1*11:04L HLA-DRB1*12:02L HLA-DRB1*07:01L
  source 1..15: note = Severe acute respiratory syndrome coronavirus 2
AAIVLQLPQGTTLPK

SEQ ID NO: 17015 - protein, 17 aa, Severe acute respiratory syndrome-related coronavirus
  REGION 1..17: note = Table B: HLA-DRB1*04:04L HLA-DRB1*04:10L
  source 1..17: note = Severe acute respiratory syndrome coronavirus 2
TPGSSRGTSPARMAGNG

SEQ ID NO: 17016 - protein, 15 aa, Severe acute respiratory syndrome-related coronavirus
  REGION 1..15: note = Table B: HLA-DRB1*04:04L HLA-DRB1*08:04L HLA-DRB1*08:77L HLA-DRB3*02:01L HLA-DRB1*11:03L HLA-DRB1*11:04L HLA-DRB1*14:02L HLA-DQA1*01:01-B1*05:01L HLA-DRB5*01:01L HLA-DRB1*04:10L HLA-DRB1*12:02L HLA-DRB3*01:01L HLA-DPA1*03:01-B1*105:01L
  REGION 1..15: note = CONT. FROM ABOVE: HLA-DPA1*01:03-B1*104:01L HLA-DRB1*07:01L HLA- DRB1*10:01L HLA-DRB1*04:08L HLA-DRB1*15:03L
  source 1..15: note = Severe acute respiratory syndrome coronavirus 2
SPARMAGNGGDAALA

SEQ ID NO: 17017 - protein, 14 aa, Severe acute respiratory syndrome-related coronavirus
  REGION 1..14: note = Table B: HLA-DRB1*04:04L
  source 1..14: note = Severe acute respiratory syndrome coronavirus 2
ALALLLLDRLNQLE

SEQ ID NO: 17018 - protein, 15 aa, Severe acute respiratory syndrome-related coronavirus
  REGION 1..15: note = Table B: HLA-DRB1*04:04L HLA-DRB1*11:03L HLA-DRB1*12:01L HLA-DRB3*01:01L HLA-DRB1*14:17L HLA-DRB1*08:02L HLA-DRB1*15:03L
  source 1..15: note = Severe acute respiratory syndrome coronavirus 2
LNQLESKMSGKGQQQ

SEQ ID NO: 17019 - protein, 13 aa, Severe acute respiratory syndrome-related coronavirus
  REGION 1..13: note = Table B: HLA-DRB1*04:04L HLA-DRB1*04:05L HLA-DRB1*01:02L HLA-DRB1*07:01L
  source 1..13: note = Severe acute respiratory syndrome coronavirus 2
RQKRTATKAYNVT

SEQ ID NO: 17020 - protein, 14 aa, Severe acute respiratory syndrome-related coronavirus
  REGION 1..14: note = Table B: HLA-DRB1*04:04L HLA-DRB1*11:04L HLA-DRB1*11:01L HLA-DPA1*02:01-B1*13:01L HLA-DPA1*01:02-B1*04:01L
  source 1..14: note = Severe acute respiratory syndrome coronavirus 2
ATKAYNVTQAFGRR

SEQ ID NO: 17021 - protein, 14 aa, Severe acute respiratory syndrome-related coronavirus
  REGION 1..14: note = Table B: HLA-DRB1*04:04L HLA-DRB1*08:04L HLA-DRB1*04:08L
  source 1..14: note = Severe acute respiratory syndrome coronavirus 2
WPQIAQFAPSASAF

SEQ ID NO: 17022 - protein, 13 aa, Severe acute respiratory syndrome-related coronavirus
  REGION 1..13: note = Table B: HLA-DRB1*04:04L HLA-DRB1*11:04L HLA-DQA1*01:01-B1*05:01L HLA-DRB1*08:01L HLA-DRB5*01:01L HLA-DRB3*01:01L HLA-DPA1*01:03-B1*104:01L HLA-DRB1*08:03L
  source 1..13: note = Severe acute respiratory syndrome coronavirus 2
IAQFAPSASAFFG

SEQ ID NO: 17023 - protein, 16 aa, Severe acute respiratory syndrome-related coronavirus
  REGION 1..16: note = Table B: HLA-DRB1*04:04L HLA-DRB4*03:01NL HLA-DRB1*08:77L HLA-DRB1*11:02L HLA-DRB4*01:01L HLA-DRB1*09:01L HLA-DRB1*12:02L HLA-DRB3*01:01L HLA-DPA1*01:03-B1*02:01L HLA-DRB1*14:17L HLA-DRB1*07:01L HLA-DRB1*10:01L
  source 1..16: note = Severe acute respiratory syndrome coronavirus 2
APSASAFFGMSRIGME

SEQ ID NO: 17024 - protein, 12 aa, Severe acute respiratory syndrome-related coronavirus
  REGION 1..12: note = Table B: HLA-DRB1*04:04L HLA-DQA1*01:02-B1*06:02L HLA-DRB1*01:02L HLA-DPA1*01:03-B1*03:01L HLA-DQA1*05:01-B1*02:01L HLA-DPA1*02:01-B1*13:01L
  source 1..12: note = Severe acute respiratory syndrome coronavirus 2
MSRIGMEVTPSG

SEQ ID NO: 17025 - protein, 13 aa, Severe acute respiratory syndrome-related coronavirus
  REGION 1..13: note = Table B: HLA-DRB1*04:04L HLA-DRB1*14:01L HLA-DPA1*01:02-B1*04:01L
  source 1..13: note = Severe acute respiratory syndrome coronavirus 2
SRIGMEVTPSGTW

SEQ ID NO: 17026 - protein, 16 aa, Severe acute respiratory syndrome-related coronavirus
  REGION 1..16: note = Table B: HLA-DRB1*04:04L HLA-DRB1*04:08L
  source 1..16: note = Severe acute respiratory syndrome coronavirus 2
IGMEVTPSGTWLTYTG

SEQ ID NO: 17027 - protein, 14 aa, Severe acute respiratory syndrome-related coronavirus
  REGION 1..14: note = Table B: HLA-DRB1*04:04L HLA-DRB1*15:01L
  source 1..14: note = Severe acute respiratory syndrome coronavirus 2
TWLTYTGAIKLDDK

SEQ ID NO: 17028 - protein, 14 aa, Severe acute respiratory syndrome-related coronavirus
  REGION 1..14: note = Table B: HLA-DRB1*04:04L HLA-DRB1*01:02L
  source 1..14: note = Severe acute respiratory syndrome coronavirus 2
TLLPAADLDDFSKQ

SEQ ID NO: 17029 - protein, 16 aa, Severe acute respiratory syndrome-related coronavirus
  REGION 1..16: note = Table B: HLA-DRB1*04:04L HLA-DRB1*03:01L HLA-DRB1*11:02L HLA-DRB1*11:03L HLA-DRB1*14:02L HLA-DRB1*11:01L HLA-DPA1*01:03-B1*04:02L HLA-DPA1*01:03-B1*02:01L HLA-DQA1*05:05-B1*03:01L HLA-DRB1*08:03L
  source 1..16: note = Severe acute respiratory syndrome coronavirus 2
LPAADLDDFSKQLQQS

SEQ ID NO: 17030 - protein, 12 aa, Severe acute respiratory syndrome-related coronavirus
  REGION 1..12: note = Table B: HLA-DRB1*04:04L HLA-DRB1*08:04L HLA-DRB1*08:77L HLA-DRB1*11:03L HLA-DRB1*11:04L HLA-DQA1*01:01-B1*05:01L HLA-DRB3*01:01L HLA-DPA1*01:03-B1*02:01L HLA-DRB1*07:01L HLA-DRB1*04:08L
  source 1..12: note = Severe acute respiratory syndrome coronavirus 2
IAQVDVVNFNLT

SEQ ID NO: 17031 - protein, 14 aa, Severe acute respiratory syndrome-related coronavirus
  REGION 1..14: note = Table B: HLA-DRB1*04:05L HLA-DPA1*01:03-B1*03:01L HLA-DRB1*04:08L
  source 1..14: note = Severe acute respiratory syndrome coronavirus 2
THVQLSLPVLQVRD

SEQ ID NO: 17032 - protein, 13 aa, Severe acute respiratory syndrome-related coronavirus
  REGION 1..13: note = Table B: HLA-DRB1*04:05L HLA-DRB1*03:01L
  source 1..13: note = Severe acute respiratory syndrome coronavirus 2
EVLSEARQHLKDG

SEQ ID NO: 17033 - protein, 12 aa, Severe acute respiratory syndrome-related coronavirus
  REGION 1..12: note = Table B: HLA-DRB1*04:05L HLA-DRB1*01:02L HLA-DRB1*08:04L
  source 1..12: note = Severe acute respiratory syndrome coronavirus 2
PYVFIKRSDART

SEQ ID NO: 17034 - protein, 14 aa, Severe acute respiratory syndrome-related coronavirus
  REGION 1..14: note = Table B: HLA-DRB1*04:05L HLA-DRB1*12:01L HLA-DRB1*16:01L
  source 1..14: note = Severe acute respiratory syndrome coronavirus 2
RKVLLRKNGNKGAG

SEQ ID NO: 17035 - protein, 16 aa, Severe acute respiratory syndrome-related coronavirus
  REGION 1..16: note = Table B: HLA-DRB1*04:05L HLA-DQA1*01:02-B1*06:02L HLA-DRB1*11:04L HLA-DRB1*11:01L HLA-DRB3*01:01L HLA-DRB1*15:03L
  source 1..16: note = Severe acute respiratory syndrome coronavirus 2
KVLLRKNGNKGAGGHS

SEQ ID NO: 17036 - protein, 13 aa, Severe acute respiratory syndrome-related coronavirus
  REGION 1..13: note = Table B: HLA-DRB1*04:05L HLA-DQA1*01:02-B1*06:02L HLA-DPA1*02:01-B1*13:01L HLA-DPA1*03:01-B1*105:01L
  source 1..13: note = Severe acute respiratory syndrome coronavirus 2
ADLKSFDLGDELG

SEQ ID NO: 17037 - protein, 14 aa, Severe acute respiratory syndrome-related coronavirus
  REGION 1..14: note = Table B: HLA-DRB1*04:05L HLA-DRB1*04:08L
  source 1..14: note = Severe acute respiratory syndrome coronavirus 2
TDPYEDFQENWNTK

SEQ ID NO: 17038 - protein, 14 aa, Severe acute respiratory syndrome-related coronavirus
  REGION 1..14: note = Table B: HLA-DRB1*04:05L HLA-DRB1*15:03L
  source 1..14: note = Severe acute respiratory syndrome coronavirus 2
ENWNTKHSSGVTRE

SEQ ID NO: 17039 - protein, 12 aa, Severe acute respiratory syndrome-related coronavirus
  REGION 1..12: note = Table B: HLA-DRB1*04:05L HLA-DRB1*01:02L
  source 1..12: note = Severe acute respiratory syndrome coronavirus 2
RELMRELNGGAY

SEQ ID NO: 17040 - protein, 14 aa, Severe acute respiratory syndrome-related coronavirus
  REGION 1..14: note = Table B: HLA-DRB1*04:05L HLA-DRB1*01:02L HLA-DPA1*01:03-B1*03:01L HLA-DRB1*12:01L HLA-DPA1*02:01-B1*13:01L HLA-DPA1*01:03-B1*104:01L HLA-DQA1*05:05-B1*03:01L
  source 1..14: note = Severe acute respiratory syndrome coronavirus 2
LLARAGKASCTLSE

SEQ ID NO: 17041 - protein, 12 aa, Severe acute respiratory syndrome-related coronavirus
  REGION 1..12: note = Table B: HLA-DRB1*04:05L HLA-DRB1*12:01L
  source 1..12: note = Severe acute respiratory syndrome coronavirus 2
IDTKRGVYCCRE

SEQ ID NO: 17042 - protein, 12 aa, Severe acute respiratory syndrome-related coronavirus
  REGION 1..12: note = Table B: HLA-DRB1*04:05L HLA-DRB1*12:01L
  source 1..12: note = Severe acute respiratory syndrome coronavirus 2
DTKRGVYCCREH

SEQ ID NO: 17043 - protein, 12 aa, Severe acute respiratory syndrome-related coronavirus
  REGION 1..12: note = Table B: HLA-DRB1*04:05L HLA-DQA1*01:02-B1*06:02L HLA-DRB1*01:02L HLA-DRB1*12:01L HLA-DRB1*04:08L HLA-DRB1*15:03L
  source 1..12: note = Severe acute respiratory syndrome coronavirus 2
HEIAWYTERSEK

SEQ ID NO: 17044 - protein, 11 aa, Severe acute respiratory syndrome-related coronavirus
  REGION 1..11: note = Table B: HLA-DRB1*04:05L HLA-DRB1*01:01L HLA-DPA1*01:03-B1*03:01L HLA-DPA1*03:01-B1*04:02L HLA-DRB1*14:01L HLA-DRB1*14:02L HLA-DRB1*12:02L HLA-DRB1*07:01L HLA-DRB1*10:01L
  source 1..11: note = Severe acute respiratory syndrome coronavirus 2
SYELQTPFEIK

SEQ ID NO: 17045 - protein, 15 aa, Severe acute respiratory syndrome-related coronavirus
  REGION 1..15: note = Table B: HLA-DRB1*04:05L HLA-DRB1*11:04L
  source 1..15: note = Severe acute respiratory syndrome coronavirus 2
IKTIQPRVEKKKLDG

SEQ ID NO: 17046 - protein, 13 aa, Severe acute respiratory syndrome-related coronavirus
  REGION 1..13: note = Table B: HLA-DRB1*04:05L HLA-DRB1*08:04L HLA-DRB1*14:02L HLA-DRB1*11:01L HLA-DPA1*01:03-B1*104:01L
  source 1..13: note = Severe acute respiratory syndrome coronavirus 2
ETSWQTGDFVKAT

SEQ ID NO: 17047 - protein, 15 aa, Severe acute respiratory syndrome-related coronavirus
  REGION 1..15: note = Table B: HLA-DRB1*04:05L HLA-DRB1*01:02L HLA-DRB1*12:01L HLA-DRB1*16:01L HLA-DRB1*04:08L
  source 1..15: note = Severe acute respiratory syndrome coronavirus 2
LPQNAVVKIYCPACH

SEQ ID NO: 17048 - protein, 12 aa, Severe acute respiratory syndrome-related coronavirus
  REGION 1..12: note = Table B: HLA-DRB1*04:05L HLA-DRB1*01:02L HLA-DPA1*01:03-B1*03:01L HLA-DRB1*12:01L HLA-DPA1*02:01-B1*13:01L HLA-DRB1*15:03L
  source 1..12: note = Severe acute respiratory syndrome coronavirus 2
AVVKIYCPACHN

SEQ ID NO: 17049 - protein, 13 aa, Severe acute respiratory syndrome-related coronavirus
  REGION 1..13: note = Table B: HLA-DRB1*04:05L HLA-DQA1*01:02-B1*06:02L HLA-DRB1*01:02L HLA-DPA1*01:03-B1*03:01L HLA-DRB1*12:01L HLA-DPA1*02:01-B1*13:01L
  source 1..13: note = Severe acute respiratory syndrome coronavirus 2
VVKIYCPACHNSE

SEQ ID NO: 17050 - protein, 16 aa, Severe acute respiratory syndrome-related coronavirus
  REGION 1..16: note = Table B: HLA-DRB1*04:05L HLA-DRB1*08:04L HLA-DRB1*08:01L HLA-DPA1*02:01-B1*13:01L HLA-DRB1*04:08L
  source 1..16: note = Severe acute respiratory syndrome coronavirus 2
VKIYCPACHNSEVGPE

SEQ ID NO: 17051 - protein, 13 aa, Severe acute respiratory syndrome-related coronavirus
  REGION 1..13: note = Table B: HLA-DRB1*04:05L
  source 1..13: note = Severe acute respiratory syndrome coronavirus 2
VGPEHSLAEYHNE

SEQ ID NO: 17052 - protein, 14 aa, Severe acute respiratory syndrome-related coronavirus
  REGION 1..14: note = Table B: HLA-DRB1*04:05L
  source 1..14: note = Severe acute respiratory syndrome coronavirus 2
NESGLKTILRKGGR

SEQ ID NO: 17053 - protein, 14 aa, Severe acute respiratory syndrome-related coronavirus
  REGION 1..14: note = Table B: HLA-DRB1*04:05L HLA-DRB1*11:02L HLA-DRB1*13:01L HLA-DQA1*05:05-B1*03:116L HLA-DRB1*14:54L HLA-DRB1*08:02L HLA-DRB1*08:03L HLA-DRB1*15:03L
  source 1..14: note = Severe acute respiratory syndrome coronavirus 2
ESGLKTILRKGGRT

SEQ ID NO: 17054 - protein, 16 aa, Severe acute respiratory syndrome-related coronavirus
  REGION 1..16: note = Table B: HLA-DRB1*04:05L
  source 1..16: note = Severe acute respiratory syndrome coronavirus 2
LKTILRKGGRTIAFGG

SEQ ID NO: 17055 - protein, 13 aa, Severe acute respiratory syndrome-related coronavirus
  REGION 1..13: note = Table B: HLA-DRB1*04:05L HLA-DPA1*01:03-B1*03:01L HLA-DRB1*12:01L HLA-DPA1*02:01-B1*13:01L HLA-DPA1*01:03-B1*104:01L
  source 1..13: note = Severe acute respiratory syndrome coronavirus 2
QKEKVNINIVGDF

SEQ ID NO: 17056 - protein, 12 aa, Severe acute respiratory syndrome-related coronavirus
  REGION 1..12: note = Table B: HLA-DRB1*04:05L HLA-DRB1*12:01L HLA-DPA1*02:01-B1*13:01L
  source 1..12: note = Severe acute respiratory syndrome coronavirus 2
EKVNINIVGDFK

SEQ ID NO: 17057 - protein, 14 aa, Severe acute respiratory syndrome-related coronavirus
  REGION 1..14: note = Table B: HLA-DRB1*04:05L HLA-DQA1*05:05-B1*03:01L HLA-DRB1*04:08L
  source 1..14: note = Severe acute respiratory syndrome coronavirus 2
EEIAIILASFSAST

SEQ ID NO: 17058 - protein, 12 aa, Severe acute respiratory syndrome-related coronavirus
  REGION 1..12: note = Table B: HLA-DRB1*04:05L HLA-DRB1*01:02L HLA-DQA1*01-B1*05L HLA-DRB4*02:01NL HLA-DRB1*04:08L
  source 1..12: note = Severe acute respiratory syndrome coronavirus 2
SASTSAFVETVK

SEQ ID NO: 17059 - protein, 12 aa, Severe acute respiratory syndrome-related coronavirus
  REGION 1..12: note = Table B: HLA-DRB1*04:05L HLA-DRB1*01:02L HLA-DPA1*01:03-B1*03:01L HLA-DQA1*01-B1*05L HLA-DRB4*02:01NL HLA-DRB1*14:17L HLA-DPA1*01:02-B1*04:01L HLA-DRB1*04:08L HLA-DRB1*15:03L
  source 1..12: note = Severe acute respiratory syndrome coronavirus 2
ASTSAFVETVKG

SEQ ID NO: 17060 - protein, 13 aa, Severe acute respiratory syndrome-related coronavirus
  REGION 1..13: note = Table B: HLA-DRB1*04:05L HLA-DPA1*01:03-B1*03:01L HLA-DRB1*12:01L HLA-DPA1*02:01-B1*13:01L
  source 1..13: note = Severe acute respiratory syndrome coronavirus 2
KAFKQIVESCGNF

SEQ ID NO: 17061 - protein, 13 aa, Severe acute respiratory syndrome-related coronavirus
  REGION 1..13: note = Table B: HLA-DRB1*04:05L HLA-DRB1*01:02L HLA-DPA1*01:03-B1*03:01L HLA-DRB1*12:01L HLA-DPA1*02:01-B1*13:01L
  source 1..13: note = Severe acute respiratory syndrome coronavirus 2
AFKQIVESCGNFK

SEQ ID NO: 17062 - protein, 12 aa, Severe acute respiratory syndrome-related coronavirus
  REGION 1..12: note = Table B: HLA-DRB1*04:05L HLA-DRB1*01:02L HLA-DRB3*02:01L HLA-DRB1*12:02L HLA-DRB1*14:54L
  source 1..12: note = Severe acute respiratory syndrome coronavirus 2
IGEQKSILSPLY

SEQ ID NO: 17063 - protein, 14 aa, Severe acute respiratory syndrome-related coronavirus
  REGION 1..14: note = Table B: HLA-DRB1*04:05L
  source 1..14: note = Severe acute respiratory syndrome coronavirus 2
RVVRSIFSRTLETA

SEQ ID NO: 17064 - protein, 14 aa, Severe acute respiratory syndrome-related coronavirus
  REGION 1..14: note = Table B: HLA-DRB1*04:05L HLA-DRB1*08:01L HLA-DPA1*01:03-B1*04:02L HLA-DPA1*02:01-B1*13:01L HLA-DQA1*05:05-B1*03:01L
  source 1..14: note = Severe acute respiratory syndrome coronavirus 2
VVRSIFSRTLETAQ

SEQ ID NO: 17065 - protein, 12 aa, Severe acute respiratory syndrome-related coronavirus
  REGION 1..12: note = Table B: HLA-DRB1*04:05L HLA-DRB4*03:01NL HLA-DRB1*08:04L HLA-DPA1*01:03-B1*03:01L HLA-DQA1*01:01-B1*05:01L HLA-DRB1*08:01L HLA-DQA1*01-B1*05L HLA-DPA1*01:03-B1*04:01L HLA-DRB1*04:10L HLA-DPA1*01:03-B1*04:02L HLA-DRB1*12:01L
  REGION 1..12: note = CONT. FROM ABOVE: HLA-DPA1*02:01-B1*13:01L HLA-DRB1*14:54L HLA-D QA1*05:05-B1*03:01L HLA-DRB1*04:08L
  source 1..12: note = Severe acute respiratory syndrome coronavirus 2
SIFSRTLETAQN

SEQ ID NO: 17066 - protein, 12 aa, Severe acute respiratory syndrome-related coronavirus
  REGION 1..12: note = Table B: HLA-DRB1*04:05L HLA-DPA1*01:03-B1*03:01L HLA-DRB1*12:01L HLA-DPA1*02:01-B1*13:01L
  source 1..12: note = Severe acute respiratory syndrome coronavirus 2
IFSRTLETAQNS

SEQ ID NO: 17067 - protein, 12 aa, Severe acute respiratory syndrome-related coronavirus
  REGION 1..12: note = Table B: HLA-DRB1*04:05L HLA-DRB1*01:02L HLA-DRB1*12:01L HLA-DPA1*03:01-B1*105:01L HLA-DQA1*03:01-B1*03:02L HLA-DRB1*16:01L HLA-DRB1*04:08L
  source 1..12: note = Severe acute respiratory syndrome coronavirus 2
KPVLDWLEEKFK

SEQ ID NO: 17068 - protein, 13 aa, Severe acute respiratory syndrome-related coronavirus
  REGION 1..13: note = Table B: HLA-DRB1*04:05L HLA-DRB1*14:01L HLA-DRB1*11:04L HLA-DRB3*01:01L
  source 1..13: note = Severe acute respiratory syndrome coronavirus 2
LDWLEEKFKEGVE

SEQ ID NO: 17069 - protein, 12 aa, Severe acute respiratory syndrome-related coronavirus
  REGION 1..12: note = Table B: HLA-DRB1*04:05L HLA-DRB1*12:01L HLA-DPA1*02:01-B1*13:01L
  source 1..12: note = Severe acute respiratory syndrome coronavirus 2
EKFKEGVEFLRD

SEQ ID NO: 17070 - protein, 12 aa, Severe acute respiratory syndrome-related coronavirus
  REGION 1..12: note = Table B: HLA-DRB1*04:05L HLA-DRB1*12:01L HLA-DPA1*02:01-B1*13:01L HLA-DQA1*03:01-B1*03:02L HLA-DPA1*01:02-B1*04:01L HLA-DRB1*16:01L HLA-DRB1*15:03L
  source 1..12: note = Severe acute respiratory syndrome coronavirus 2
KEGVEFLRDGWE

SEQ ID NO: 17071 - protein, 11 aa, Severe acute respiratory syndrome-related coronavirus
  REGION 1..11: note = Table B: HLA-DRB1*04:05L HLA-DQA1*05:05-B1*03:19L
  source 1..11: note = Severe acute respiratory syndrome coronavirus 2
FLRDGWEIVKF

SEQ ID NO: 17072 - protein, 13 aa, Severe acute respiratory syndrome-related coronavirus
  REGION 1..13: note = Table B: HLA-DRB1*04:05L HLA-DRB1*11:04L HLA-DRB1*11:01L HLA-DRB3*01:01L
  source 1..13: note = Severe acute respiratory syndrome coronavirus 2
KESVQTFFKLVNK

SEQ ID NO: 17073 - protein, 13 aa, Severe acute respiratory syndrome-related coronavirus
  REGION 1..13: note = Table B: HLA-DRB1*04:05L
  source 1..13: note = Severe acute respiratory syndrome coronavirus 2
ADSIIIGGAKLKA

SEQ ID NO: 17074 - protein, 13 aa, Severe acute respiratory syndrome-related coronavirus
  REGION 1..13: note = Table B: HLA-DRB1*04:05L HLA-DRB1*11:03L HLA-DRB1*14:02L
  source 1..13: note = Severe acute respiratory syndrome coronavirus 2
SIIIGGAKLKALN

SEQ ID NO: 17075 - protein, 14 aa, Severe acute respiratory syndrome-related coronavirus
  REGION 1..14: note = Table B: HLA-DRB1*04:05L HLA-DPA1*01:03-B1*03:01L HLA-DRB1*12:01L HLA-DPA1*02:01-B1*13:01L HLA-DRB1*04:08L
  source 1..14: note = Severe acute respiratory syndrome coronavirus 2
KALNLGETFVTHSK

SEQ ID NO: 17076 - protein, 17 aa, Severe acute respiratory syndrome-related coronavirus
  REGION 1..17: note = Table B: HLA-DRB1*04:05L
  source 1..17: note = Severe acute respiratory syndrome coronavirus 2
VKSREETGLLMPLKAPK

SEQ ID NO: 17077 - protein, 15 aa, Severe acute respiratory syndrome-related coronavirus
  REGION 1..15: note = Table B: HLA-DRB1*04:05L
  source 1..15: note = Severe acute respiratory syndrome coronavirus 2
EGETLPTEVLTEEVV

SEQ ID NO: 17078 - protein, 12 aa, Severe acute respiratory syndrome-related coronavirus
  REGION 1..12: note = Table B: HLA-DRB1*04:05L HLA-DQA1*01:02-B1*06:02L HLA-DQA1*02:01-B1*03:03L
  source 1..12: note = Severe acute respiratory syndrome coronavirus 2
GLMLLEIKDTEK

SEQ ID NO: 17079 - protein, 12 aa, Severe acute respiratory syndrome-related coronavirus
  REGION 1..12: note = Table B: HLA-DRB1*04:05L HLA-DRB1*01:02L HLA-DRB1*08:04L HLA-DRB3*02:01L HLA-DQA1*05:05-B1*03:01L HLA-DRB1*04:08L
  source 1..12: note = Severe acute respiratory syndrome coronavirus 2
LMLLEIKDTEKY

SEQ ID NO: 17080 - protein, 14 aa, Severe acute respiratory syndrome-related coronavirus
  REGION 1..14: note = Table B: HLA-DRB1*04:05L HLA-DRB1*01:02L HLA-DRB1*08:01L HLA-DPA1*02:01-B1*13:01L HLA-DPA1*03:01-B1*105:01L HLA-DRB1*16:01L HLA-DQA1*01:03-B1*06:01L HLA-DRB1*04:08L
  source 1..14: note = Severe acute respiratory syndrome coronavirus 2
GYKSVNITFELDER

SEQ ID NO: 17081 - protein, 13 aa, Severe acute respiratory syndrome-related coronavirus
  REGION 1..13: note = Table B: HLA-DRB1*04:05L HLA-DRB1*01:02L HLA-DQA1*01:03-B1*06:01L HLA-DRB1*04:08L
  source 1..13: note = Severe acute respiratory syndrome coronavirus 2
ELDERIDKVLNEK

SEQ ID NO: 17082 - protein, 14 aa, Severe acute respiratory syndrome-related coronavirus
  REGION 1..14: note = Table B: HLA-DRB1*04:05L
  source 1..14: note = Severe acute respiratory syndrome coronavirus 2
RIDKVLNEKCSAYT

SEQ ID NO: 17083 - protein, 12 aa, Severe acute respiratory syndrome-related coronavirus
  REGION 1..12: note = Table B: HLA-DRB1*04:05L HLA-DQA1*01:01-B1*05:01L HLA-DQA1*05:05-B1*03:01L HLA-DRB1*14:17L
  source 1..12: note = Severe acute respiratory syndrome coronavirus 2
TVELGTEVNEFA

SEQ ID NO: 17084 - protein, 14 aa, Severe acute respiratory syndrome-related coronavirus
  REGION 1..14: note = Table B: HLA-DRB1*04:05L
  source 1..14: note = Severe acute respiratory syndrome coronavirus 2
LTPLGIDLDEWSMA

SEQ ID NO: 17085 - protein, 14 aa, Severe acute respiratory syndrome-related coronavirus
  REGION 1..14: note = Table B: HLA-DRB1*04:05L HLA-DQA1*03:01-B1*03:02L HLA-DRB1*16:01L
  source 1..14: note = Severe acute respiratory syndrome coronavirus 2
TPLGIDLDEWSMAT

SEQ ID NO: 17086 - protein, 10 aa, Severe acute respiratory syndrome-related coronavirus
  REGION 1..10: note = Table B: HLA-DRB1*04:05L HLA-DQA1*01:02-B1*06:02L HLA-DQA1*05:05-B1*03:19L HLA-DPA1*02:01-B1*13:01L HLA-DQA1*01:03-B1*06:01L HLA-DRB1*15:03L
  source 1..10: note = Severe acute respiratory syndrome coronavirus 2
YYLFDESGEF

SEQ ID NO: 17087 - protein, 15 aa, Severe acute respiratory syndrome-related coronavirus
  REGION 1..15: note = Table B: HLA-DRB1*04:05L
  source 1..15: note = Severe acute respiratory syndrome coronavirus 2
SHMYCSFYPPDEDEE

SEQ ID NO: 17088 - protein, 15 aa, Severe acute respiratory syndrome-related coronavirus
  REGION 1..15: note = Table B: HLA-DRB1*04:05L HLA-DPA1*02:01-B1*13:01L
  source 1..15: note = Severe acute respiratory syndrome coronavirus 2
QPEEEQEEDWLDDDS

SEQ ID NO: 17089 - protein, 13 aa, Severe acute respiratory syndrome-related coronavirus
  REGION 1..13: note = Table B: HLA-DRB1*04:05L HLA-DQA1*01:02-B1*06:02L HLA-DRB4*03:01NL HLA-DQA1*01-B1*05L HLA-DRB1*04:10L HLA-DRB1*12:01L HLA-DRB1*14:54L HLA-DRB1*16:01L
  source 1..13: note = Severe acute respiratory syndrome coronavirus 2
TTTIQTIVEVQPQ

SEQ ID NO: 17090 - protein, 11 aa, Severe acute respiratory syndrome-related coronavirus
  REGION 1..11: note = Table B: HLA-DRB1*04:05L HLA-DQA1*01:02-B1*06:02L HLA-DRB1*14:01L HLA-DRB1*04:10L HLA-DPA1*03:01-B1*105:01L HLA-DRB1*14:54L HLA-DQA1*05:05-B1*03:01L HLA-DRB1*15:03L
  source 1..11: note = Severe acute respiratory syndrome coronavirus 2
IVEVQPQLEME

SEQ ID NO: 17091 - protein, 13 aa, Severe acute respiratory syndrome-related coronavirus
  REGION 1..13: note = Table B: HLA-DRB1*04:05L HLA-DRB1*04:10L HLA-DPA1*03:01-B1*105:01L
  source 1..13: note = Severe acute respiratory syndrome coronavirus 2
MELTPVVQTIEVN

SEQ ID NO: 17092 - protein, 12 aa, Severe acute respiratory syndrome-related coronavirus
  REGION 1..12: note = Table B: HLA-DRB1*04:05L HLA-DRB1*01:02L HLA-DRB1*14:54L HLA-DRB1*04:08L
  source 1..12: note = Severe acute respiratory syndrome coronavirus 2
TIEVNSFSGYLK

SEQ ID NO: 17093 - protein, 12 aa, Severe acute respiratory syndrome-related coronavirus
  REGION 1..12: note = Table B: HLA-DRB1*04:05L HLA-DRB1*01:02L
  source 1..12: note = Severe acute respiratory syndrome coronavirus 2
IKNADIVEEAKK

SEQ ID NO: 17094 - protein, 14 aa, Severe acute respiratory syndrome-related coronavirus
  REGION 1..14: note = Table B: HLA-DRB1*04:05L HLA-DRB1*01:02L HLA-DRB1*14:01L HLA-DRB1*08:01L HLA-DRB1*12:01L HLA-DPA1*02:01-B1*13:01L HLA-DQA1*05:05-B1*03:01L HLA-DRB1*15:03L
  source 1..14: note = Severe acute respiratory syndrome coronavirus 2
VEEAKKVKPTVVVN

SEQ ID NO: 17095 - protein, 14 aa, Severe acute respiratory syndrome-related coronavirus
  REGION 1..14: note = Table B: HLA-DRB1*04:05L HLA-DRB1*01:02L HLA-DRB1*12:01L HLA-DPA1*02:01-B1*13:01L
  source 1..14: note = Severe acute respiratory syndrome coronavirus 2
EAKKVKPTVVVNAA

SEQ ID NO: 17096 - protein, 12 aa, Severe acute respiratory syndrome-related coronavirus
  REGION 1..12: note = Table B: HLA-DRB1*04:05L HLA-DQA1*05:05-B1*03:19L HLA-DPA1*03:01-B1*105:01L
  source 1..12: note = Severe acute respiratory syndrome coronavirus 2
KVKPTVVVNAAN

SEQ ID NO: 17097 - protein, 13 aa, Severe acute respiratory syndrome-related coronavirus
  REGION 1..13: note = Table B: HLA-DRB1*04:05L HLA-DQA1*01:01-B1*05:01L HLA-DRB1*14:17L
  source 1..13: note = Severe acute respiratory syndrome coronavirus 2
KATNNAMQVESDD

SEQ ID NO: 17098 - protein, 11 aa, Severe acute respiratory syndrome-related coronavirus
  REGION 1..11: note = Table B: HLA-DRB1*04:05L HLA-DQA1*01:02-B1*06:02L HLA-DRB1*04:08L
  source 1..11: note = Severe acute respiratory syndrome coronavirus 2
IATNGPLKVGG

SEQ ID NO: 17099 - protein, 13 aa, Severe acute respiratory syndrome-related coronavirus
  REGION 1..13: note = Table B: HLA-DRB1*04:05L HLA-DPA1*01:03-B1*03:01L HLA-DPA1*01:03-B1*04:01L HLA-DRB1*12:01L HLA-DPA1*02:01-B1*13:01L
  source 1..13: note = Severe acute respiratory syndrome coronavirus 2
LLKSAYENFNQHE

SEQ ID NO: 17100 - protein, 14 aa, Severe acute respiratory syndrome-related coronavirus
  REGION 1..14: note = Table B: HLA-DRB1*04:05L HLA-DRB3*02:01L HLA-DRB1*14:02L HLA-DRB3*01:01L HLA-DPA1*01:03-B1*02:01L HLA-DRB1*08:03L
  source 1..14: note = Severe acute respiratory syndrome coronavirus 2
YENFNQHEVLLAPL

SEQ ID NO: 17101 - protein, 13 aa, Severe acute respiratory syndrome-related coronavirus
  REGION 1..13: note = Table B: HLA-DRB1*04:05L HLA-DRB1*01:02L HLA-DRB1*12:01L HLA-DRB1*16:01L HLA-DRB1*15:03L
  source 1..13: note = Severe acute respiratory syndrome coronavirus 2
HSLRVCVDTVRTN

SEQ ID NO: 17102 - protein, 11 aa, Severe acute respiratory syndrome-related coronavirus
  REGION 1..11: note = Table B: HLA-DRB1*04:05L HLA-DRB1*04:08L HLA-DRB1*15:03L
  source 1..11: note = Severe acute respiratory syndrome coronavirus 2
LAVFDKNLYDK

SEQ ID NO: 17103 - protein, 11 aa, Severe acute respiratory syndrome-related coronavirus
  REGION 1..11: note = Table B: HLA-DRB1*04:05L HLA-DRB1*08:77L HLA-DRB1*03:01L HLA-DRB4*01:01L HLA-DQA1*05:05-B1*03:116L HLA-DRB1*09:01L
  source 1..11: note = Severe acute respiratory syndrome coronavirus 2
AVFDKNLYDKL

SEQ ID NO: 17104 - protein, 16 aa, Severe acute respiratory syndrome-related coronavirus
  REGION 1..16: note = Table B: HLA-DRB1*04:05L
  source 1..16: note = Severe acute respiratory syndrome coronavirus 2
ITESKPSVEQRKQDDK

SEQ ID NO: 17105 - protein, 14 aa, Severe acute respiratory syndrome-related coronavirus
  REGION 1..14: note = Table B: HLA-DRB1*04:05L HLA-DQA1*01:02-B1*06:02L HLA-DRB1*01:02L HLA-DRB1*12:01L HLA-DRB1*16:01L HLA-DQA1*02:01-B1*03:03L
  source 1..14: note = Severe acute respiratory syndrome coronavirus 2
SKPSVEQRKQDDKK

SEQ ID NO: 17106 - protein, 15 aa, Severe acute respiratory syndrome-related coronavirus
  REGION 1..15: note = Table B: HLA-DRB1*04:05L HLA-DRB1*16:01L
  source 1..15: note = Severe acute respiratory syndrome coronavirus 2
KPSVEQRKQDDKKIK

SEQ ID NO: 17107 - protein, 13 aa, Severe acute respiratory syndrome-related coronavirus
  REGION 1..13: note = Table B: HLA-DRB1*04:05L HLA-DQA1*01:02-B1*06:02L HLA-DRB1*12:01L HLA-DPA1*02:01-B1*13:01L HLA-DQA1*03:01-B1*03:02L
  source 1..13: note = Severe acute respiratory syndrome coronavirus 2
DDKKIKACVEEVT

SEQ ID NO: 17108 - protein, 15 aa, Severe acute respiratory syndrome-related coronavirus
  REGION 1..15: note = Table B: HLA-DRB1*04:05L
  source 1..15: note = Severe acute respiratory syndrome coronavirus 2
IKACVEEVTTTLEET

SEQ ID NO: 17109 - protein, 12 aa, Severe acute respiratory syndrome-related coronavirus
  REGION 1..12: note = Table B: HLA-DRB1*04:05L HLA-DRB1*08:04L HLA-DPA1*01:03-B1*03:01L HLA-DRB1*03:01L HLA-DRB1*14:02L HLA-DRB1*08:01L HLA-DPA1*03:01-B1*105:01L HLA-DRB1*04:08L
  source 1..12: note = Severe acute respiratory syndrome coronavirus 2
TFLKKDAPYIVG

SEQ ID NO: 17110 - protein, 11 aa, Severe acute respiratory syndrome-related coronavirus
  REGION 1..11: note = Table B: HLA-DRB1*04:05L HLA-DPA1*01:03-B1*03:01L HLA-DQA1*01:01-B1*05:01L HLA-DRB1*15:03L
  source 1..11: note = Severe acute respiratory syndrome coronavirus 2
GVLTAVVIPTK

SEQ ID NO: 17111 - protein, 13 aa, Severe acute respiratory syndrome-related coronavirus
  REGION 1..13: note = Table B: HLA-DRB1*04:05L HLA-DRB4*03:01NL HLA-DRB1*11:04L HLA-DRB1*11:01L HLA-DRB1*12:01L HLA-DRB1*16:01L HLA-DRB1*04:08L
  source 1..13: note = Severe acute respiratory syndrome coronavirus 2
TAVVIPTKKAGGT

SEQ ID NO: 17112 - protein, 14 aa, Severe acute respiratory syndrome-related coronavirus
  REGION 1..14: note = Table B: HLA-DRB1*04:05L HLA-DRB1*08:01L HLA-DRB1*12:01L HLA-DRB1*15:03L
  source 1..14: note = Severe acute respiratory syndrome coronavirus 2
AGGTTEMLAKALRK

SEQ ID NO: 17113 - protein, 13 aa, Severe acute respiratory syndrome-related coronavirus
  REGION 1..13: note = Table B: HLA-DRB1*04:05L
  source 1..13: note = Severe acute respiratory syndrome coronavirus 2
AKALRKVPTDNYI

SEQ ID NO: 17114 - protein, 13 aa, Severe acute respiratory syndrome-related coronavirus
  REGION 1..13: note = Table B: HLA-DRB1*04:05L HLA-DRB1*01:02L
  source 1..13: note = Severe acute respiratory syndrome coronavirus 2
ALRKVPTDNYITT

SEQ ID NO: 17115 - protein, 13 aa, Severe acute respiratory syndrome-related coronavirus
  REGION 1..13: note = Table B: HLA-DRB1*04:05L HLA-DRB1*04:10L HLA-DRB1*16:01L
  source 1..13: note = Severe acute respiratory syndrome coronavirus 2
GQGLNGYTVEEAK

SEQ ID NO: 17116 - protein, 11 aa, Severe acute respiratory syndrome-related coronavirus
  REGION 1..11: note = Table B: HLA-DRB1*04:05L HLA-DQA1*01:02-B1*06:02L HLA-DRB4*03:01NL HLA-DRB1*14:17L HLA-DRB1*16:01L
  source 1..11: note = Severe acute respiratory syndrome coronavirus 2
LNGYTVEEAKT

SEQ ID NO: 17117 - protein, 14 aa, Severe acute respiratory syndrome-related coronavirus
  REGION 1..14: note = Table B: HLA-DRB1*04:05L HLA-DRB1*01:02L HLA-DPA1*02:01-B1*13:01L HLA-DPA1*03:01-B1*105:01L HLA-DQA1*05:05-B1*03:01L HLA-DQA1*01:03-B1*06:01L
  source 1..14: note = Severe acute respiratory syndrome coronavirus 2
SNEKQEILGTVSWN

SEQ ID NO: 17118 - protein, 14 aa, Severe acute respiratory syndrome-related coronavirus
  REGION 1..14: note = Table B: HLA-DRB1*04:05L HLA-DRB1*08:04L HLA-DRB1*11:03L HLA-DRB1*11:04L HLA-DRB1*08:01L HLA-DRB1*11:01L HLA-DRB1*04:08L
  source 1..14: note = Severe acute respiratory syndrome coronavirus 2
LGTVSWNLREMLAH

SEQ ID NO: 17119 - protein, 14 aa, Severe acute respiratory syndrome-related coronavirus
  REGION 1..14: note = Table B: HLA-DRB1*04:05L HLA-DRB1*01:02L HLA-DRB1*12:01L HLA-DRB1*04:08L
  source 1..14: note = Severe acute respiratory syndrome coronavirus 2
SWNLREMLAHAEET

SEQ ID NO: 17120 - protein, 12 aa, Severe acute respiratory syndrome-related coronavirus
  REGION 1..12: note = Table B: HLA-DRB1*04:05L HLA-DQA1*01:02-B1*06:02L HLA-DRB1*01:02L HLA-DRB1*16:01L
  source 1..12: note = Severe acute respiratory syndrome coronavirus 2
LREMLAHAEETR

SEQ ID NO: 17121 - protein, 13 aa, Severe acute respiratory syndrome-related coronavirus
  REGION 1..13: note = Table B: HLA-DRB1*04:05L HLA-DRB1*12:01L HLA-DPA1*02:01-B1*13:01L
  source 1..13: note = Severe acute respiratory syndrome coronavirus 2
EETRKLMPVCVET

SEQ ID NO: 17122 - protein, 12 aa, Severe acute respiratory syndrome-related coronavirus
  REGION 1..12: note = Table B: HLA-DRB1*04:05L HLA-DRB1*01:02L HLA-DRB1*12:01L HLA-DPA1*02:01-B1*13:01L
  source 1..12: note = Severe acute respiratory syndrome coronavirus 2
TRKLMPVCVETK

SEQ ID NO: 17123 - protein, 12 aa, Severe acute respiratory syndrome-related coronavirus
  REGION 1..12: note = Table B: HLA-DRB1*04:05L
  source 1..12: note = Severe acute respiratory syndrome coronavirus 2
QRKYKGIKIQEG

SEQ ID NO: 17124 - protein, 14 aa, Severe acute respiratory syndrome-related coronavirus
  REGION 1..14: note = Table B: HLA-DRB1*04:05L HLA-DPA1*02:01-B1*13:01L HLA-DPA1*01:03-B1*104:01L HLA-DRB1*16:01L HLA-DRB1*04:08L
  source 1..14: note = Severe acute respiratory syndrome coronavirus 2
TSKTTVASLINTLN

SEQ ID NO: 17125 - protein, 14 aa, Severe acute respiratory syndrome-related coronavirus
  REGION 1..14: note = Table B: HLA-DRB1*04:05L
  source 1..14: note = Severe acute respiratory syndrome coronavirus 2
TTVASLINTLNDLN

SEQ ID NO: 17126 - protein, 13 aa, Severe acute respiratory syndrome-related coronavirus
  REGION 1..13: note = Table B: HLA-DRB1*04:05L
  source 1..13: note = Severe acute respiratory syndrome coronavirus 2
THGLNLEEAARYM

SEQ ID NO: 17127 - protein, 14 aa, Severe acute respiratory syndrome-related coronavirus
  REGION 1..14: note = Table B: HLA-DRB1*04:05L HLA-DRB3*01:01L HLA-DRB1*04:08L
  source 1..14: note = Severe acute respiratory syndrome coronavirus 2
HGLNLEEAARYMRS

SEQ ID NO: 17128 - protein, 13 aa, Severe acute respiratory syndrome-related coronavirus
  REGION 1..13: note = Table B: HLA-DRB1*04:05L HLA-DQA1*01:03-B1*06:01L
  source 1..13: note = Severe acute respiratory syndrome coronavirus 2
KVPATVSVSSPDA

SEQ ID NO: 17129 - protein, 13 aa, Severe acute respiratory syndrome-related coronavirus
  REGION 1..13: note = Table B: HLA-DRB1*04:05L HLA-DRB1*01:02L HLA-DRB3*02:01L HLA-DRB1*04:08L
  source 1..13: note = Severe acute respiratory syndrome coronavirus 2
ISLAGSYKDWSYS

SEQ ID NO: 17130 - protein, 17 aa, Severe acute respiratory syndrome-related coronavirus
  REGION 1..17: note = Table B: HLA-DRB1*04:05L HLA-DRB1*12:01L
  source 1..17: note = Severe acute respiratory syndrome coronavirus 2
EFLKRGDKSVYYTSNPT

SEQ ID NO: 17131 - protein, 11 aa, Severe acute respiratory syndrome-related coronavirus
  REGION 1..11: note = Table B: HLA-DRB1*04:05L
  source 1..11: note = Severe acute respiratory syndrome coronavirus 2
YYTSNPTTFHL

SEQ ID NO: 17132 - protein, 12 aa, Severe acute respiratory syndrome-related coronavirus
  REGION 1..12: note = Table B: HLA-DRB1*04:05L HLA-DQA1*01:02-B1*06:02L HLA-DRB1*01:02L HLA-DRB1*12:01L HLA-DRB1*16:01L HLA-DRB1*15:03L
  source 1..12: note = Severe acute respiratory syndrome coronavirus 2
LKTLLSLREVRT

SEQ ID NO: 17133 - protein, 14 aa, Severe acute respiratory syndrome-related coronavirus
  REGION 1..14: note = Table B: HLA-DRB1*04:05L
  source 1..14: note = Severe acute respiratory syndrome coronavirus 2
LSLREVRTIKVFTT

SEQ ID NO: 17134 - protein, 13 aa, Severe acute respiratory syndrome-related coronavirus
  REGION 1..13: note = Table B: HLA-DRB1*04:05L HLA-DRB1*01:02L HLA-DPA1*01:03-B1*03:01L HLA-DRB1*12:01L HLA-DQA1*03:01-B1*03:02L HLA-DRB1*16:01L HLA-DRB1*04:08L HLA-DRB1*15:03L
  source 1..13: note = Severe acute respiratory syndrome coronavirus 2
REVRTIKVFTTVD

SEQ ID NO: 17135 - protein, 12 aa, Severe acute respiratory syndrome-related coronavirus
  REGION 1..12: note = Table B: HLA-DRB1*04:05L HLA-DRB1*08:04L HLA-DPA1*01:03-B1*03:01L HLA-DRB1*03:01L HLA-DRB3*01:01L HLA-DRB1*04:08L
  source 1..12: note = Severe acute respiratory syndrome coronavirus 2
YVLPNDDTLRVE

SEQ ID NO: 17136 - protein, 11 aa, Severe acute respiratory syndrome-related coronavirus
  REGION 1..11: note = Table B: HLA-DRB1*04:05L HLA-DQA1*03:01-B1*03:02L HLA-DPA1*01:03-B1*104:01L HLA-DRB1*16:01L HLA-DQA1*01:03-B1*06:01L HLA-DQA1*02:01-B1*03:03L
  source 1..11: note = Severe acute respiratory syndrome coronavirus 2
KYPQVNGLTSI

SEQ ID NO: 17137 - protein, 12 aa, Severe acute respiratory syndrome-related coronavirus
  REGION 1..12: note = Table B: HLA-DRB1*04:05L HLA-DRB1*08:04L
  source 1..12: note = Severe acute respiratory syndrome coronavirus 2
QIELKFNPPALQ

SEQ ID NO: 17138 - protein, 11 aa, Severe acute respiratory syndrome-related coronavirus
  REGION 1..11: note = Table B: HLA-DRB1*04:05L HLA-DPA1*01:02-B1*04:01L
  source 1..11: note = Severe acute respiratory syndrome coronavirus 2
YRARAGEAANF

SEQ ID NO: 17139 - protein, 12 aa, Severe acute respiratory syndrome-related coronavirus
  REGION 1..12: note = Table B: HLA-DRB1*04:05L HLA-DRB1*01:02L HLA-DPA1*01:03-B1*03:01L
  source 1..12: note = Severe acute respiratory syndrome coronavirus 2
RARAGEAANFCA

SEQ ID NO: 17140 - protein, 15 aa, Severe acute respiratory syndrome-related coronavirus
  REGION 1..15: note = Table B: HLA-DRB1*04:05L HLA-DPA1*01:03-B1*03:01L HLA-DPA1*03:01-B1*04:02L HLA-DRB1*11:02L HLA-DRB1*11:04L HLA-DRB1*14:02L HLA-DRB1*11:01L HLA-DRB1*08:02L HLA-DRB1*08:03L
  source 1..15: note = Severe acute respiratory syndrome coronavirus 2
ALILAYCNKTVGELG

SEQ ID NO: 17141 - protein, 12 aa, Severe acute respiratory syndrome-related coronavirus
  REGION 1..12: note = Table B: HLA-DRB1*04:05L HLA-DQA1*01:02-B1*06:02L HLA-DRB1*04:10L
  source 1..12: note = Severe acute respiratory syndrome coronavirus 2
NKTVGELGDVRE

SEQ ID NO: 17142 - protein, 11 aa, Severe acute respiratory syndrome-related coronavirus
  REGION 1..11: note = Table B: HLA-DRB1*04:05L
  source 1..11: note = Severe acute respiratory syndrome coronavirus 2
TTLKGVEAVMY

SEQ ID NO: 17143 - protein, 13 aa, Severe acute respiratory syndrome-related coronavirus
  REGION 1..13: note = Table B: HLA-DRB1*04:05L HLA-DRB1*01:02L HLA-DRB1*04:10L
  source 1..13: note = Severe acute respiratory syndrome coronavirus 2
EAVMYMGTLSYEQ

SEQ ID NO: 17144 - protein, 15 aa, Severe acute respiratory syndrome-related coronavirus
  REGION 1..15: note = Table B: HLA-DRB1*04:05L HLA-DRB1*01:02L HLA-DRB1*12:01L HLA-DPA1*02:01-B1*13:01L
  source 1..15: note = Severe acute respiratory syndrome coronavirus 2
EQFKKGVQIPCTCGK

SEQ ID NO: 17145 - protein, 15 aa, Severe acute respiratory syndrome-related coronavirus
  REGION 1..15: note = Table B: HLA-DRB1*04:05L HLA-DRB1*12:01L HLA-DPA1*02:01-B1*13:01L
  source 1..15: note = Severe acute respiratory syndrome coronavirus 2
QFKKGVQIPCTCGKQ

SEQ ID NO: 17146 - protein, 14 aa, Severe acute respiratory syndrome-related coronavirus
  REGION 1..14: note = Table B: HLA-DRB1*04:05L HLA-DRB1*01:02L HLA-DPA1*02:01-B1*13:01L HLA-DRB1*16:01L
  source 1..14: note = Severe acute respiratory syndrome coronavirus 2
GKQATKYLVQQESP

SEQ ID NO: 17147 - protein, 16 aa, Severe acute respiratory syndrome-related coronavirus
  REGION 1..16: note = Table B: HLA-DRB1*04:05L HLA-DPA1*01:03-B1*03:01L HLA-DRB1*14:02L HLA-DRB1*11:01L HLA-DPA1*02:01-B1*13:01L
  source 1..16: note = Severe acute respiratory syndrome coronavirus 2
KHGTFTCASEYTGNYQ

SEQ ID NO: 17148 - protein, 13 aa, Severe acute respiratory syndrome-related coronavirus
  REGION 1..13: note = Table B: HLA-DRB1*04:05L HLA-DRB1*14:01L HLA-DRB1*12:01L HLA-DRB1*15:03L
  source 1..13: note = Severe acute respiratory syndrome coronavirus 2
HITSKETLYCIDG

SEQ ID NO: 17149 - protein, 13 aa, Severe acute respiratory syndrome-related coronavirus
  REGION 1..13: note = Table B: HLA-DRB1*04:05L
  source 1..13: note = Severe acute respiratory syndrome coronavirus 2
IDGALLTKSSEYK

SEQ ID NO: 17150 - protein, 13 aa, Severe acute respiratory syndrome-related coronavirus
  REGION 1..13: note = Table B: HLA-DRB1*04:05L HLA-DRB1*01:02L HLA-DPA1*03:01-B1*04:02L HLA-DRB1*15:03L
  source 1..13: note = Severe acute respiratory syndrome coronavirus 2
YKGPITDVFYKEN

SEQ ID NO: 17151 - protein, 13 aa, Severe acute respiratory syndrome-related coronavirus
  REGION 1..13: note = Table B: HLA-DRB1*04:05L HLA-DRB4*03:01NL HLA-DRB1*04:08L
  source 1..13: note = Severe acute respiratory syndrome coronavirus 2
TDVFYKENSYTTT

SEQ ID NO: 17152 - protein, 12 aa, Severe acute respiratory syndrome-related coronavirus
  REGION 1..12: note = Table B: HLA-DRB1*04:05L HLA-DQA1*01:02-B1*06:02L HLA-DRB1*01:02L HLA-DRB1*08:01L HLA-DQA1*01-B1*05L HLA-DPA1*03:01-B1*105:01L HLA-DPA1*01:02-B1*04:01L HLA-DRB1*16:01L HLA-DRB1*04:08L
  source 1..12: note = Severe acute respiratory syndrome coronavirus 2
FDNFKFVCDNIK

SEQ ID NO: 17153 - protein, 14 aa, Severe acute respiratory syndrome-related coronavirus
  REGION 1..14: note = Table B: HLA-DRB1*04:05L HLA-DPA1*02:01-B1*13:01L
  source 1..14: note = Severe acute respiratory syndrome coronavirus 2
DNFKFVCDNIKFAD

SEQ ID NO: 17154 - protein, 12 aa, Severe acute respiratory syndrome-related coronavirus
  REGION 1..12: note = Table B: HLA-DRB1*04:05L HLA-DQA1*01:02-B1*06:02L HLA-DRB1*12:01L HLA-DQA1*01:03-B1*06:01L HLA-DRB1*15:03L
  source 1..12: note = Severe acute respiratory syndrome coronavirus 2
TGYKKPASRELK

SEQ ID NO: 17155 - protein, 13 aa, Severe acute respiratory syndrome-related coronavirus
  REGION 1..13: note = Table B: HLA-DRB1*04:05L
  source 1..13: note = Severe acute respiratory syndrome coronavirus 2
RELKVTFFPDLNG

SEQ ID NO: 17156 - protein, 13 aa, Severe acute respiratory syndrome-related coronavirus
  REGION 1..13: note = Table B: HLA-DRB1*04:05L HLA-DRB3*02:01L HLA-DRB1*11:03L HLA-DRB1*11:04L HLA-DRB1*08:01L HLA-DRB1*11:01L HLA-DRB1*04:08L
  source 1..13: note = Severe acute respiratory syndrome coronavirus 2
GDVVAIDYKHYTP

SEQ ID NO: 17157 - protein, 12 aa, Severe acute respiratory syndrome-related coronavirus
  REGION 1..12: note = Table B: HLA-DRB1*04:05L HLA-DQA1*01:02-B1*06:02L HLA-DRB1*01:02L HLA-DRB1*12:01L HLA-DPA1*03:01-B1*105:01L HLA-DRB1*15:03L
  source 1..12: note = Severe acute respiratory syndrome coronavirus 2
AIDYKHYTPSFK

SEQ ID NO: 17158 - protein, 12 aa, Severe acute respiratory syndrome-related coronavirus
  REGION 1..12: note = Table B: HLA-DRB1*04:05L HLA-DRB1*01:02L HLA-DRB1*12:01L HLA-DRB1*15:03L
  source 1..12: note = Severe acute respiratory syndrome coronavirus 2
IDYKHYTPSFKK

SEQ ID NO: 17159 - protein, 13 aa, Severe acute respiratory syndrome-related coronavirus
  REGION 1..13: note = Table B: HLA-DRB1*04:05L HLA-DRB1*01:02L HLA-DRB1*08:01L HLA-DRB1*12:01L HLA-DPA1*02:01-B1*13:01L
  source 1..13: note = Severe acute respiratory syndrome coronavirus 2
KGAKLLHKPIVWH

SEQ ID NO: 17160 - protein, 14 aa, Severe acute respiratory syndrome-related coronavirus
  REGION 1..14: note = Table B: HLA-DRB1*04:05L HLA-DQA1*01:02-B1*06:02L HLA-DRB1*01:02L HLA-DRB1*08:01L HLA-DRB1*12:01L HLA-DPA1*02:01-B1*13:01L HLA-DRB1*16:01L HLA-DRB1*04:08L HLA-DRB1*15:03L
  source 1..14: note = Severe acute respiratory syndrome coronavirus 2
GAKLLHKPIVWHVN

SEQ ID NO: 17161 - protein, 16 aa, Severe acute respiratory syndrome-related coronavirus
  REGION 1..16: note = Table B: HLA-DRB1*04:05L HLA-DPA1*02:01-B1*13:01L HLA-DPA1*03:01-B1*105:01L
  source 1..16: note = Severe acute respiratory syndrome coronavirus 2
KPANNSLKITEEVGHT

SEQ ID NO: 17162 - protein, 13 aa, Severe acute respiratory syndrome-related coronavirus
  REGION 1..13: note = Table B: HLA-DRB1*04:05L HLA-DRB3*01:01L HLA-DRB1*04:08L HLA-DRB1*15:03L
  source 1..13: note = Severe acute respiratory syndrome coronavirus 2
SSLTIKKPNELSR

SEQ ID NO: 17163 - protein, 12 aa, Severe acute respiratory syndrome-related coronavirus
  REGION 1..12: note = Table B: HLA-DRB1*04:05L HLA-DRB1*01:02L HLA-DRB1*12:01L HLA-DRB1*16:01L
  source 1..12: note = Severe acute respiratory syndrome coronavirus 2
SRVLGLKTLATH

SEQ ID NO: 17164 - protein, 13 aa, Severe acute respiratory syndrome-related coronavirus
  REGION 1..13: note = Table B: HLA-DRB1*04:05L HLA-DRB4*03:01NL HLA-DRB1*14:01L HLA-DRB1*04:10L HLA-DRB1*14:54L
  source 1..13: note = Severe acute respiratory syndrome coronavirus 2
HGLAAVNSVPWDT

SEQ ID NO: 17165 - protein, 14 aa, Severe acute respiratory syndrome-related coronavirus
  REGION 1..14: note = Table B: HLA-DRB1*04:05L HLA-DRB1*01:02L HLA-DPA1*02:01-B1*13:01L HLA-DRB1*16:01L HLA-DRB1*04:08L HLA-DQA1*02:01-B1*03:03L HLA-DRB1*15:03L
  source 1..14: note = Severe acute respiratory syndrome coronavirus 2
YAKPFLNKVVSTTT

SEQ ID NO: 17166 - protein, 16 aa, Severe acute respiratory syndrome-related coronavirus
  REGION 1..16: note = Table B: HLA-DRB1*04:05L HLA-DRB1*12:01L HLA-DPA1*01:03-B1*104:01L
  source 1..16: note = Severe acute respiratory syndrome coronavirus 2
IVTRCLNRVCTNYMPY

SEQ ID NO: 17167 - protein, 10 aa, Severe acute respiratory syndrome-related coronavirus
  REGION 1..10: note = Table B: HLA-DRB1*04:05L HLA-DQA1*01:02-B1*06:02L HLA-DQA1*05:05-B1*03:19L HLA-DPA1*02:01-B1*13:01L HLA-DPA1*03:01-B1*105:01L HLA-DQA1*01:03-B1*06:01L HLA-DRB1*15:03L
  source 1..10: note = Severe acute respiratory syndrome coronavirus 2
NYMPYFFTLL

SEQ ID NO: 17168 - protein, 14 aa, Severe acute respiratory syndrome-related coronavirus
  REGION 1..14: note = Table B: HLA-DRB1*04:05L HLA-DPA1*02:01-B1*13:01L
  source 1..14: note = Severe acute respiratory syndrome coronavirus 2
TNSRIKASMPTTIA

SEQ ID NO: 17169 - protein, 12 aa, Severe acute respiratory syndrome-related coronavirus
  REGION 1..12: note = Table B: HLA-DRB1*04:05L HLA-DRB1*07:01L HLA-DRB1*04:08L HLA-DRB1*15:03L
  source 1..12: note = Severe acute respiratory syndrome coronavirus 2
RIKASMPTTIAK

SEQ ID NO: 17170 - protein, 12 aa, Severe acute respiratory syndrome-related coronavirus
  REGION 1..12: note = Table B: HLA-DRB1*04:05L HLA-DQA1*05:05-B1*03:01L HLA-DRB1*07:01L
  source 1..12: note = Severe acute respiratory syndrome coronavirus 2
FNYLKSPNFSKL

SEQ ID NO: 17171 - protein, 13 aa, Severe acute respiratory syndrome-related coronavirus
  REGION 1..13: note = Table B: HLA-DRB1*04:05L HLA-DRB1*11:03L
  source 1..13: note = Severe acute respiratory syndrome coronavirus 2
LGVLMSNLGMPSY

SEQ ID NO: 17172 - protein, 13 aa, Severe acute respiratory syndrome-related coronavirus
  REGION 1..13: note = Table B: HLA-DRB1*04:05L HLA-DRB1*01:02L HLA-DPA1*03:01-B1*105:01L HLA-DQA1*03:01-B1*03:02L HLA-DQA1*05:05-B1*03:01L HLA-DQA1*02:01-B1*03:03L HLA-DRB1*15:03L
  source 1..13: note = Severe acute respiratory syndrome coronavirus 2
SYVHVVDGCNSST

SEQ ID NO: 17173 - protein, 13 aa, Severe acute respiratory syndrome-related coronavirus
  REGION 1..13: note = Table B: HLA-DRB1*04:05L HLA-DRB1*01:02L HLA-DPA1*01:03-B1*03:01L HLA-DRB1*12:01L HLA-DPA1*02:01-B1*13:01L
  source 1..13: note = Severe acute respiratory syndrome coronavirus 2
RATRVECTTIVNG

SEQ ID NO: 17174 - protein, 14 aa, Severe acute respiratory syndrome-related coronavirus
  REGION 1..14: note = Table B: HLA-DRB1*04:05L HLA-DRB1*01:02L HLA-DRB1*12:01L HLA-DPA1*02:01-B1*13:01L
  source 1..14: note = Severe acute respiratory syndrome coronavirus 2
NGVRRSFYVYANGG

SEQ ID NO: 17175 - protein, 13 aa, Severe acute respiratory syndrome-related coronavirus
  REGION 1..13: note = Table B: HLA-DRB1*04:05L HLA-DRB1*01:02L HLA-DRB1*04:08L HLA-DQA1*02:01-B1*03:03L
  source 1..13: note = Severe acute respiratory syndrome coronavirus 2
AGQKTYERHSLSH

SEQ ID NO: 17176 - protein, 12 aa, Severe acute respiratory syndrome-related coronavirus
  REGION 1..12: note = Table B: HLA-DRB1*04:05L HLA-DQA1*01:02-B1*06:02L HLA-DRB1*01:02L HLA-DRB1*08:01L HLA-DPA1*02:01-B1*13:01L HLA-DRB1*04:08L
  source 1..12: note = Severe acute respiratory syndrome coronavirus 2
RHSLSHFVNLDN

SEQ ID NO: 17177 - protein, 14 aa, Severe acute respiratory syndrome-related coronavirus
  REGION 1..14: note = Table B: HLA-DRB1*04:05L HLA-DRB1*01:02L HLA-DPA1*01:03-B1*03:01L HLA-DRB1*14:01L HLA-DRB1*04:10L HLA-DRB1*12:01L HLA-DQA1*05:05-B1*03:01L HLA-DRB1*04:08L
  source 1..14: note = Severe acute respiratory syndrome coronavirus 2
GSLPINVIVFDGKS

SEQ ID NO: 17178 - protein, 14 aa, Severe acute respiratory syndrome-related coronavirus
  REGION 1..14: note = Table B: HLA-DRB1*04:05L HLA-DRB1*01:02L HLA-DRB1*12:01L HLA-DPA1*02:01-B1*13:01L
  source 1..14: note = Severe acute respiratory syndrome coronavirus 2
GKSKCEESSAKSAS

SEQ ID NO: 17179 - protein, 14 aa, Severe acute respiratory syndrome-related coronavirus
  REGION 1..14: note = Table B: HLA-DRB1*04:05L
  source 1..14: note = Severe acute respiratory syndrome coronavirus 2
ESSAKSASVYYSQL

SEQ ID NO: 17180 - protein, 12 aa, Severe acute respiratory syndrome-related coronavirus
  REGION 1..12: note = Table B: HLA-DRB1*04:05L HLA-DQA1*02:01-B1*03:03L
  source 1..12: note = Severe acute respiratory syndrome coronavirus 2
KLKTLVATAEAE

SEQ ID NO: 17181 - protein, 11 aa, Severe acute respiratory syndrome-related coronavirus
  REGION 1..11: note = Table B: HLA-DRB1*04:05L HLA-DRB1*01:02L HLA-DRB1*08:77L
  source 1..11: note = Severe acute respiratory syndrome coronavirus 2
LVATAEAELAK

SEQ ID NO: 17182 - protein, 12 aa, Severe acute respiratory syndrome-related coronavirus
  REGION 1..12: note = Table B: HLA-DRB1*04:05L HLA-DRB1*01:02L HLA-DQA1*01-B1*05L HLA-DRB1*12:01L HLA-DRB1*04:08L HLA-DRB1*15:03L
  source 1..12: note = Severe acute respiratory syndrome coronavirus 2
VLSTFISAARQG

SEQ ID NO: 17183 - protein, 12 aa, Severe acute respiratory syndrome-related coronavirus
  REGION 1..12: note = Table B: HLA-DRB1*04:05L HLA-DRB1*04:08L
  source 1..12: note = Severe acute respiratory syndrome coronavirus 2
RQGFVDSDVETK

SEQ ID NO: 17184 - protein, 14 aa, Severe acute respiratory syndrome-related coronavirus
  REGION 1..14: note = Table B: HLA-DRB1*04:05L HLA-DRB1*01:02L HLA-DRB1*12:01L HLA-DPA1*02:01-B1*13:01L
  source 1..14: note = Severe acute respiratory syndrome coronavirus 2
VETKDVVECLKLSH

SEQ ID NO: 17185 - protein, 14 aa, Severe acute respiratory syndrome-related coronavirus
  REGION 1..14: note = Table B: HLA-DRB1*04:05L
  source 1..14: note = Severe acute respiratory syndrome coronavirus 2
ETKDVVECLKLSHQ

SEQ ID NO: 17186 - protein, 13 aa, Severe acute respiratory syndrome-related coronavirus
  REGION 1..13: note = Table B: HLA-DRB1*04:05L HLA-DQA1*01:02-B1*06:02L HLA-DRB1*01:02L HLA-DRB1*16:01L HLA-DRB1*15:03L
  source 1..13: note = Severe acute respiratory syndrome coronavirus 2
LKLSHQSDIEVTG

SEQ ID NO: 17187 - protein, 11 aa, Severe acute respiratory syndrome-related coronavirus
  REGION 1..11: note = Table B: HLA-DRB1*04:05L HLA-DRB4*03:01NL HLA-DRB1*08:01L HLA-DRB1*12:01L HLA-DRB1*14:54L HLA-DPA1*01:02-B1*04:01L HLA-DRB1*16:01L HLA-DRB1*04:08L
  source 1..11: note = Severe acute respiratory syndrome coronavirus 2
TYNKVENMTPR

SEQ ID NO: 17188 - protein, 12 aa, Severe acute respiratory syndrome-related coronavirus
  REGION 1..12: note = Table B: HLA-DRB1*04:05L HLA-DRB1*01:02L HLA-DRB1*14:01L
  source 1..12: note = Severe acute respiratory syndrome coronavirus 2
NKVENMTPRDLG

SEQ ID NO: 17189 - protein, 14 aa, Severe acute respiratory syndrome-related coronavirus
  REGION 1..14: note = Table B: HLA-DRB1*04:05L HLA-DQA1*05:05-B1*03:01L HLA-DQA1*01:03-B1*06:01L
  source 1..14: note = Severe acute respiratory syndrome coronavirus 2
AQVAKSHNIALIWN

SEQ ID NO: 17190 - protein, 14 aa, Severe acute respiratory syndrome-related coronavirus
  REGION 1..14: note = Table B: HLA-DRB1*04:05L HLA-DRB1*01:02L HLA-DRB1*12:01L HLA-DPA1*02:01-B1*13:01L HLA-DPA1*03:01-B1*105:01L HLA-DQA1*03:01-B1*03:02L
  source 1..14: note = Severe acute respiratory syndrome coronavirus 2
VAKSHNIALIWNVK

SEQ ID NO: 17191 - protein, 12 aa, Severe acute respiratory syndrome-related coronavirus
  REGION 1..12: note = Table B: HLA-DRB1*04:05L HLA-DRB1*04:08L
  source 1..12: note = Severe acute respiratory syndrome coronavirus 2
KDFMSLSEQLRK

SEQ ID NO: 17192 - protein, 13 aa, Severe acute respiratory syndrome-related coronavirus
  REGION 1..13: note = Table B: HLA-DRB1*04:05L HLA-DRB1*14:01L HLA-DRB1*12:01L HLA-DRB1*04:08L
  source 1..13: note = Severe acute respiratory syndrome coronavirus 2
IRSAAKKNNLPFK

SEQ ID NO: 17193 - protein, 15 aa, Severe acute respiratory syndrome-related coronavirus
  REGION 1..15: note = Table B: HLA-DRB1*04:05L
  source 1..15: note = Severe acute respiratory syndrome coronavirus 2
KNNLPFKLTCATTRQ

SEQ ID NO: 17194 - protein, 13 aa, Severe acute respiratory syndrome-related coronavirus
  REGION 1..13: note = Table B: HLA-DRB1*04:05L HLA-DRB1*08:01L HLA-DRB3*01:01L
  source 1..13: note = Severe acute respiratory syndrome coronavirus 2
TTKIALKGGKIVN

SEQ ID NO: 17195 - protein, 14 aa, Severe acute respiratory syndrome-related coronavirus
  REGION 1..14: note = Table B: HLA-DRB1*04:05L HLA-DRB1*11:01L
  source 1..14: note = Severe acute respiratory syndrome coronavirus 2
IALKGGKIVNNWLK

SEQ ID NO: 17196 - protein, 12 aa, Severe acute respiratory syndrome-related coronavirus
  REGION 1..12: note = Table B: HLA-DRB1*04:05L HLA-DQA1*01:02-B1*06:02L HLA-DRB1*01:02L HLA-DRB1*12:01L HLA-DPA1*02:01-B1*13:01L HLA-DQA1*03:01-B1*03:02L HLA-DQA1*02:01-B1*03:03L
  source 1..12: note = Severe acute respiratory syndrome coronavirus 2
KGGKIVNNWLKQ

SEQ ID NO: 17197 - protein, 12 aa, Severe acute respiratory syndrome-related coronavirus
  REGION 1..12: note = Table B: HLA-DRB1*04:05L HLA-DQA1*01:01-B1*05:01L HLA-DRB1*12:01L HLA-DPA1*02:01-B1*13:01L HLA-DQA1*01:03-B1*06:01L HLA-DQA1*02:01-B1*03:03L HLA-DRB1*15:03L
  source 1..12: note = Severe acute respiratory syndrome coronavirus 2
SKHTDFSSEIIG

SEQ ID NO: 17198 - protein, 13 aa, Severe acute respiratory syndrome-related coronavirus
  REGION 1..13: note = Table B: HLA-DRB1*04:05L HLA-DRB1*14:17L HLA-DRB1*16:01L HLA-DRB1*04:08L HLA-DRB1*15:03L
  source 1..13: note = Severe acute respiratory syndrome coronavirus 2
HADFDTWFSQRGG

SEQ ID NO: 17199 - protein, 14 aa, Severe acute respiratory syndrome-related coronavirus
  REGION 1..14: note = Table B: HLA-DRB1*04:05L
  source 1..14: note = Severe acute respiratory syndrome coronavirus 2
NDKACPLIAAVITR

SEQ ID NO: 17200 - protein, 12 aa, Severe acute respiratory syndrome-related coronavirus
  REGION 1..12: note = Table B: HLA-DRB1*04:05L HLA-DPA1*02:01-B1*13:01L
  source 1..12: note = Severe acute respiratory syndrome coronavirus 2
SKLIEYTDFATS

SEQ ID NO: 17201 - protein, 14 aa, Severe acute respiratory syndrome-related coronavirus
  REGION 1..14: note = Table B: HLA-DRB1*04:05L HLA-DPA1*03:01-B1*04:02L HLA-DRB1*14:02L HLA-DRB1*08:01L HLA-DRB1*04:10L HLA-DPA1*02:01-B1*13:01L HLA-DPA1*01:03-B1*104:01L HLA-DRB1*16:01L
  source 1..14: note = Severe acute respiratory syndrome coronavirus 2
TNVLEGSVAYESLR

SEQ ID NO: 17202 - protein, 11 aa, Severe acute respiratory syndrome-related coronavirus
  REGION 1..11: note = Table B: HLA-DRB1*04:05L
  source 1..11: note = Severe acute respiratory syndrome coronavirus 2
SIIQFPNTYLE

SEQ ID NO: 17203 - protein, 12 aa, Severe acute respiratory syndrome-related coronavirus
  REGION 1..12: note = Table B: HLA-DRB1*04:05L HLA-DRB1*01:02L HLA-DRB3*02:01L
  source 1..12: note = Severe acute respiratory syndrome coronavirus 2
SVRVVTTFDSEY

SEQ ID NO: 17204 - protein, 14 aa, Severe acute respiratory syndrome-related coronavirus
  REGION 1..14: note = Table B: HLA-DRB1*04:05L HLA-DRB1*08:01L HLA-DPA1*01:03-B1*104:01L HLA-DRB1*15:03L
  source 1..14: note = Severe acute respiratory syndrome coronavirus 2
LDISASIVAGGIVA

SEQ ID NO: 17205 - protein, 13 aa, Severe acute respiratory syndrome-related coronavirus
  REGION 1..13: note = Table B: HLA-DRB1*04:05L HLA-DRB1*12:01L HLA-DRB1*15:03L
  source 1..13: note = Severe acute respiratory syndrome coronavirus 2
FMRFRRAFGEYSH

SEQ ID NO: 17206 - protein, 12 aa, Severe acute respiratory syndrome-related coronavirus
  REGION 1..12: note = Table B: HLA-DRB1*04:05L HLA-DRB1*01:02L HLA-DRB1*08:01L HLA-DRB1*12:01L HLA-DRB1*04:08L
  source 1..12: note = Severe acute respiratory syndrome coronavirus 2
RRAFGEYSHVVA

SEQ ID NO: 17207 - protein, 11 aa, Severe acute respiratory syndrome-related coronavirus
  REGION 1..11: note = Table B: HLA-DRB1*04:05L HLA-DPA1*02:01-B1*13:01L HLA-DQA1*01:03-B1*06:01L HLA-DQA1*02:01-B1*03:03L
  source 1..11: note = Severe acute respiratory syndrome coronavirus 2
AFGEYSHVVAF

SEQ ID NO: 17208 - protein, 12 aa, Severe acute respiratory syndrome-related coronavirus
  REGION 1..12: note = Table B: HLA-DRB1*04:05L HLA-DRB1*01:02L HLA-DRB4*03:01NL HLA-DPA1*01:03-B1*03:01L HLA-DRB1*14:01L HLA-DQA1*01-B1*05L HLA-DRB1*04:10L HLA-DRB1*12:01L HLA-DPA1*03:01-B1*105:01L HLA-DRB1*14:54L HLA-DRB1*04:08L HLA-DRB1*15:03L
  source 1..12: note = Severe acute respiratory syndrome coronavirus 2
FGEYSHVVAFNT

SEQ ID NO: 17209 - protein, 12 aa, Severe acute respiratory syndrome-related coronavirus
  REGION 1..12: note = Table B: HLA-DRB1*04:05L HLA-DQA1*01:02-B1*06:02L HLA-DRB1*08:01L HLA-DRB1*12:01L HLA-DPA1*03:01-B1*105:01L HLA-DQA1*02:01-B1*03:03L HLA-DRB1*15:01L
  source 1..12: note = Severe acute respiratory syndrome coronavirus 2
HFYWFFSNYLKR

SEQ ID NO: 17210 - protein, 12 aa, Severe acute respiratory syndrome-related coronavirus
  REGION 1..12: note = Table B: HLA-DRB1*04:05L HLA-DQA1*01:02-B1*06:02L HLA-DPA1*03:01-B1*105:01L HLA-DRB1*15:01L
  source 1..12: note = Severe acute respiratory syndrome coronavirus 2
FYWFFSNYLKRR

SEQ ID NO: 17211 - protein, 12 aa, Severe acute respiratory syndrome-related coronavirus
  REGION 1..12: note = Table B: HLA-DRB1*04:05L HLA-DRB1*15:03L
  source 1..12: note = Severe acute respiratory syndrome coronavirus 2
YNRYLALYNKYK

SEQ ID NO: 17212 - protein, 12 aa, Severe acute respiratory syndrome-related coronavirus
  REGION 1..12: note = Table B: HLA-DRB1*04:05L HLA-DRB1*04:10L HLA-DQA1*02:01-B1*03:03L
  source 1..12: note = Severe acute respiratory syndrome coronavirus 2
LAKALNDFSNSG

SEQ ID NO: 17213 - protein, 13 aa, Severe acute respiratory syndrome-related coronavirus
  REGION 1..13: note = Table B: HLA-DRB1*04:05L HLA-DPA1*01:03-B1*03:01L HLA-DRB1*04:10L HLA-DRB1*12:01L HLA-DRB1*14:17L
  source 1..13: note = Severe acute respiratory syndrome coronavirus 2
LPTGVHAGTDLEG

SEQ ID NO: 17214 - protein, 12 aa, Severe acute respiratory syndrome-related coronavirus
  REGION 1..12: note = Table B: HLA-DRB1*04:05L
  source 1..12: note = Severe acute respiratory syndrome coronavirus 2
NRFTTTLNDFNL

SEQ ID NO: 17215 - protein, 13 aa, Severe acute respiratory syndrome-related coronavirus
  REGION 1..13: note = Table B: HLA-DRB1*04:05L HLA-DRB1*01:02L HLA-DPA1*03:01-B1*04:02L HLA-DRB1*12:01L HLA-DRB1*16:01L
  source 1..13: note = Severe acute respiratory syndrome coronavirus 2
RFTTTLNDFNLVA

SEQ ID NO: 17216 - protein, 12 aa, Severe acute respiratory syndrome-related coronavirus
  REGION 1..12: note = Table B: HLA-DRB1*04:05L HLA-DRB1*01:02L HLA-DRB1*12:01L HLA-DPA1*03:01-B1*105:01L HLA-DRB1*15:03L
  source 1..12: note = Severe acute respiratory syndrome coronavirus 2
IAVLDMCASLKE

SEQ ID NO: 17217 - protein, 15 aa, Severe acute respiratory syndrome-related coronavirus
  REGION 1..15: note = Table B: HLA-DRB1*04:05L
  source 1..15: note = Severe acute respiratory syndrome coronavirus 2
ASLKELLQNGMNGRT

SEQ ID NO: 17218 - protein, 12 aa, Severe acute respiratory syndrome-related coronavirus
  REGION 1..12: note = Table B: HLA-DRB1*04:05L HLA-DPA1*02:01-B1*13:01L
  source 1..12: note = Severe acute respiratory syndrome coronavirus 2
LEDEFTPFDVVR

SEQ ID NO: 17219 - protein, 11 aa, Severe acute respiratory syndrome-related coronavirus
  REGION 1..11: note = Table B: HLA-DRB1*04:05L HLA-DPA1*01:03-B1*03:01L HLA-DQA1*01-B1*05L HLA-DRB4*01:01L HLA-DPA1*01:03-B1*04:01L HLA-DPA1*02:01-B1*13:01L HLA-DPA1*01:03-B1*104:01L HLA-DQA1*05:05-B1*03:01L
  source 1..11: note = Severe acute respiratory syndrome coronavirus 2
VLVQSTQWSLF

SEQ ID NO: 17220 - protein, 12 aa, Severe acute respiratory syndrome-related coronavirus
  REGION 1..12: note = Table B: HLA-DRB1*04:05L HLA-DQA1*01-B1*05L HLA-DRB1*10:01L HLA-DRB1*04:08L
  source 1..12: note = Severe acute respiratory syndrome coronavirus 2
NMVYMPASWVMR

SEQ ID NO: 17221 - protein, 14 aa, Severe acute respiratory syndrome-related coronavirus
  REGION 1..14: note = Table B: HLA-DRB1*04:05L
  source 1..14: note = Severe acute respiratory syndrome coronavirus 2
DMVDTSLSGFKLKD

SEQ ID NO: 17222 - protein, 11 aa, Severe acute respiratory syndrome-related coronavirus
  REGION 1..11: note = Table B: HLA-DRB1*04:05L HLA-DRB1*08:77L HLA-DRB3*02:01L HLA-DPA1*03:01-B1*04:02L HLA-DRB1*11:03L HLA-DRB1*14:02L HLA-DQA1*05:05-B1*03:01L HLA-DQA1*01:03-B1*06:01L HLA-DRB1*04:08L
  source 1..11: note = Severe acute respiratory syndrome coronavirus 2
LILMTARTVYD

SEQ ID NO: 17223 - protein, 12 aa, Severe acute respiratory syndrome-related coronavirus
  REGION 1..12: note = Table B: HLA-DRB1*04:05L HLA-DRB1*01:02L HLA-DRB1*04:08L
  source 1..12: note = Severe acute respiratory syndrome coronavirus 2
TARTVYDDGARR

SEQ ID NO: 17224 - protein, 12 aa, Severe acute respiratory syndrome-related coronavirus
  REGION 1..12: note = Table B: HLA-DRB1*04:05L HLA-DRB1*12:01L HLA-DPA1*02:01-B1*13:01L
  source 1..12: note = Severe acute respiratory syndrome coronavirus 2
ARRVWTLMNVLT

SEQ ID NO: 17225 - protein, 14 aa, Severe acute respiratory syndrome-related coronavirus
  REGION 1..14: note = Table B: HLA-DRB1*04:05L HLA-DRB1*11:02L HLA-DRB1*11:03L HLA-DRB1*11:04L HLA-DRB1*11:01L HLA-DRB3*01:01L HLA-DPA1*01:03-B1*02:01L
  source 1..14: note = Severe acute respiratory syndrome coronavirus 2
NVLTLVYKVYYGNA

SEQ ID NO: 17226 - protein, 10 aa, Severe acute respiratory syndrome-related coronavirus
  REGION 1..10: note = Table B: HLA-DRB1*04:05L HLA-DQA1*01:02-B1*06:02L HLA-DRB1*08:77L HLA-DQA1*05:05-B1*03:19L HLA-DQA1*05:01-B1*02:01L HLA-DRB4*01:01L HLA-DPA1*02:01-B1*13:01L HLA-DQA1*01:03-B1*06:01L
  REGION 1..10: note = CONT. FROM ABOVE: HLA-DRB1*15:03L
  source 1..10: note = Severe acute respiratory syndrome coronavirus 2
YDYLVSTQEF

SEQ ID NO: 17227 - protein, 13 aa, Severe acute respiratory syndrome-related coronavirus
  REGION 1..13: note = Table B: HLA-DRB1*04:05L HLA-DQA1*01:02-B1*06:02L HLA-DPA1*01:03-B1*03:01L HLA-DRB1*12:01L HLA-DPA1*02:01-B1*13:01L
  source 1..13: note = Severe acute respiratory syndrome coronavirus 2
VGGKPCIKVATVQ

SEQ ID NO: 17228 - protein, 12 aa, Severe acute respiratory syndrome-related coronavirus
  REGION 1..12: note = Table B: HLA-DRB1*04:05L HLA-DRB1*01:02L HLA-DRB1*14:01L HLA-DRB1*15:03L
  source 1..12: note = Severe acute respiratory syndrome coronavirus 2
IKVATVQSKMSD

SEQ ID NO: 17229 - protein, 12 aa, Severe acute respiratory syndrome-related coronavirus
  REGION 1..12: note = Table B: HLA-DRB1*04:05L HLA-DQA1*01:02-B1*06:02L HLA-DRB1*01:02L HLA-DPA1*01:03-B1*03:01L HLA-DRB1*08:01L HLA-DPA1*02:01-B1*13:01L HLA-DRB1*04:08L
  source 1..12: note = Severe acute respiratory syndrome coronavirus 2
SKLWAQCVQLHN

SEQ ID NO: 17230 - protein, 13 aa, Severe acute respiratory syndrome-related coronavirus
  REGION 1..13: note = Table B: HLA-DRB1*04:05L HLA-DQA1*01:02-B1*06:02L HLA-DQA1*05:05-B1*03:19L HLA-DQA1*05:01-B1*02:01L HLA-DRB1*04:08L
  source 1..13: note = Severe acute respiratory syndrome coronavirus 2
VLLSMQGAVDINK

SEQ ID NO: 17231 - protein, 12 aa, Severe acute respiratory syndrome-related coronavirus
  REGION 1..12: note = Table B: HLA-DRB1*04:05L HLA-DQA1*01:02-B1*06:02L HLA-DRB1*01:02L HLA-DPA1*01:03-B1*03:01L HLA-DRB1*12:01L HLA-DPA1*02:01-B1*13:01L HLA-DQA1*01:03-B1*06:01L HLA-DQA1*02:01-B1*03:03L HLA-DRB1*15:03L
  source 1..12: note = Severe acute respiratory syndrome coronavirus 2
INKLCEEMLDNR

SEQ ID NO: 17232 - protein, 11 aa, Severe acute respiratory syndrome-related coronavirus
  REGION 1..11: note = Table B: HLA-DRB1*04:05L HLA-DRB1*01:01L HLA-DRB1*01:02L HLA-DQA1*05:05-B1*03:01L
  source 1..11: note = Severe acute respiratory syndrome coronavirus 2
EFSSLPSYAAF

SEQ ID NO: 17233 - protein, 13 aa, Severe acute respiratory syndrome-related coronavirus
  REGION 1..13: note = Table B: HLA-DRB1*04:05L
  source 1..13: note = Severe acute respiratory syndrome coronavirus 2
LKKSLNVAKSEFD

SEQ ID NO: 17234 - protein, 14 aa, Severe acute respiratory syndrome-related coronavirus
  REGION 1..14: note = Table B: HLA-DRB1*04:05L HLA-DRB1*01:02L HLA-DRB1*04:08L
  source 1..14: note = Severe acute respiratory syndrome coronavirus 2
VAKSEFDRDAAMQR

SEQ ID NO: 17235 - protein, 13 aa, Severe acute respiratory syndrome-related coronavirus
  REGION 1..13: note = Table B: HLA-DRB1*04:05L HLA-DRB1*01:02L HLA-DRB1*12:01L HLA-DPA1*02:01-B1*13:01L
  source 1..13: note = Severe acute respiratory syndrome coronavirus 2
AMQRKLEKMADQA

SEQ ID NO: 17236 - protein, 12 aa, Severe acute respiratory syndrome-related coronavirus
  REGION 1..12: note = Table B: HLA-DRB1*04:05L HLA-DRB1*01:02L HLA-DRB1*12:01L HLA-DPA1*02:01-B1*13:01L HLA-DQA1*03:01-B1*03:02L HLA-DRB1*04:08L HLA-DRB1*15:03L
  source 1..12: note = Severe acute respiratory syndrome coronavirus 2
RKLEKMADQAMT

SEQ ID NO: 17237 - protein, 12 aa, Severe acute respiratory syndrome-related coronavirus
  REGION 1..12: note = Table B: HLA-DRB1*04:05L HLA-DRB1*08:01L HLA-DRB1*12:01L HLA-DQA1*03:01-B1*03:02L HLA-DRB1*04:08L HLA-DQA1*02:01-B1*03:03L HLA-DRB1*15:03L
  source 1..12: note = Severe acute respiratory syndrome coronavirus 2
QMYKQARSEDKR

SEQ ID NO: 17238 - protein, 13 aa, Severe acute respiratory syndrome-related coronavirus
  REGION 1..13: note = Table B: HLA-DRB1*04:05L HLA-DRB1*01:02L HLA-DRB1*12:01L HLA-DPA1*02:01-B1*13:01L HLA-DRB1*16:01L HLA-DQA1*01:03-B1*06:01L
  source 1..13: note = Severe acute respiratory syndrome coronavirus 2
DKRAKVTSAMQTM

SEQ ID NO: 17239 - protein, 13 aa, Severe acute respiratory syndrome-related coronavirus
  REGION 1..13: note = Table B: HLA-DRB1*04:05L HLA-DRB1*04:10L
  source 1..13: note = Severe acute respiratory syndrome coronavirus 2
DNDALNNIINNAR

SEQ ID NO: 17240 - protein, 11 aa, Severe acute respiratory syndrome-related coronavirus
  REGION 1..11: note = Table B: HLA-DRB1*04:05L HLA-DPA1*02:01-B1*13:01L HLA-DQA1*01:03-B1*06:01L
  source 1..11: note = Severe acute respiratory syndrome coronavirus 2
TYKNTCDGTTF

SEQ ID NO: 17241 - protein, 14 aa, Severe acute respiratory syndrome-related coronavirus
  REGION 1..14: note = Table B: HLA-DRB1*04:05L HLA-DRB1*08:04L HLA-DRB1*14:02L HLA-DRB1*08:01L HLA-DPA1*01:03-B1*104:01L HLA-DRB1*10:01L HLA-DRB1*08:03L
  source 1..14: note = Severe acute respiratory syndrome coronavirus 2
TTFTYASALWEIQQ

SEQ ID NO: 17242 - protein, 13 aa, Severe acute respiratory syndrome-related coronavirus
  REGION 1..13: note = Table B: HLA-DRB1*04:05L HLA-DQA1*01-B1*05L HLA-DRB1*04:10L
  source 1..13: note = Severe acute respiratory syndrome coronavirus 2
ASALWEIQQVVDA

SEQ ID NO: 17243 - protein, 13 aa, Severe acute respiratory syndrome-related coronavirus
  REGION 1..13: note = Table B: HLA-DRB1*04:05L HLA-DQA1*05:01-B1*02:01L HLA-DRB1*04:10L HLA-DRB1*14:17L HLA-DRB1*04:08L
  source 1..13: note = Severe acute respiratory syndrome coronavirus 2
SALWEIQQVVDAD

SEQ ID NO: 17244 - protein, 12 aa, Severe acute respiratory syndrome-related coronavirus
  REGION 1..12: note = Table B: HLA-DRB1*04:05L HLA-DQA1*05:01-B1*02:01L
  source 1..12: note = Severe acute respiratory syndrome coronavirus 2
LWEIQQVVDADS

SEQ ID NO: 17245 - protein, 12 aa, Severe acute respiratory syndrome-related coronavirus
  REGION 1..12: note = Table B: HLA-DRB1*04:05L HLA-DRB1*08:04L HLA-DPA1*01:03-B1*03:01L HLA-DRB1*13:01L HLA-DRB1*04:10L HLA-DRB1*12:02L HLA-DRB3*01:01L HLA-DRB1*04:08L
  source 1..12: note = Severe acute respiratory syndrome coronavirus 2
LSEISMDNSPNL

SEQ ID NO: 17246 - protein, 12 aa, Severe acute respiratory syndrome-related coronavirus
  REGION 1..12: note = Table B: HLA-DRB1*04:05L HLA-DRB1*01:02L HLA-DRB1*08:04L HLA-DPA1*01:03-B1*03:01L HLA-DRB1*03:01L HLA-DRB1*04:10L HLA-DRB1*12:02L HLA-DRB3*01:01L HLA-DRB1*04:08L
  source 1..12: note = Severe acute respiratory syndrome coronavirus 2
SEISMDNSPNLA

SEQ ID NO: 17247 - protein, 12 aa, Severe acute respiratory syndrome-related coronavirus
  REGION 1..12: note = Table B: HLA-DRB1*04:05L HLA-DQA1*01:02-B1*06:02L HLA-DRB1*08:04L
  source 1..12: note = Severe acute respiratory syndrome coronavirus 2
PLIVTALRANSA

SEQ ID NO: 17248 - protein, 12 aa, Severe acute respiratory syndrome-related coronavirus
  REGION 1..12: note = Table B: HLA-DRB1*04:05L HLA-DRB1*01:01L HLA-DPA1*01:03-B1*03:01L HLA-DPA1*03:01-B1*04:02L HLA-DRB1*03:01L HLA-DRB1*11:01L HLA-DQA1*05:05-B1*03:19L HLA-DQA1*05:01-B1*02:01L HLA-DRB3*01:01L
  REGION 1..12: note = CONT. FROM ABOVE: HLA-DQA1*05:05-B1*03:01L HLA-DPA1*01:02-B1*04: 01L
  source 1..12: note = Severe acute respiratory syndrome coronavirus 2
ALRANSAVKLQN

SEQ ID NO: 17249 - protein, 12 aa, Severe acute respiratory syndrome-related coronavirus
  REGION 1..12: note = Table B: HLA-DRB1*04:05L HLA-DRB1*01:01L HLA-DRB3*02:01L HLA-DPA1*01:03-B1*03:01L HLA-DPA1*03:01-B1*04:02L HLA-DRB1*03:01L HLA-DRB1*11:02L HLA-DRB1*11:01L HLA-DQA1*05:05-B1*03:19L HLA-DQA1*05:01-B1*02:01L
  REGION 1..12: note = CONT. FROM ABOVE: HLA-DRB1*04:10L HLA-DPA1*01:03-B1*04:02L HLA-D PA1*03:01-B1*105:01L HLA-DPA1*01:02-B1*04:01L HLA-DRB1*07:01L
  source 1..12: note = Severe acute respiratory syndrome coronavirus 2
LRANSAVKLQNN

SEQ ID NO: 17250 - protein, 12 aa, Severe acute respiratory syndrome-related coronavirus
  REGION 1..12: note = Table B: HLA-DRB1*04:05L HLA-DQA1*01:02-B1*06:02L HLA-DRB1*01:02L HLA-DPA1*01:02-B1*04:01L HLA-DQA1*01:03-B1*06:01L HLA-DRB1*04:08L HLA-DRB1*15:03L
  source 1..12: note = Severe acute respiratory syndrome coronavirus 2
ALAYYNTTKGGR

SEQ ID NO: 17251 - protein, 13 aa, Severe acute respiratory syndrome-related coronavirus
  REGION 1..13: note = Table B: HLA-DRB1*04:05L HLA-DQA1*01:02-B1*06:02L HLA-DRB1*04:10L HLA-DRB1*12:01L HLA-DRB1*16:01L HLA-DRB1*04:08L HLA-DRB1*15:03L
  source 1..13: note = Severe acute respiratory syndrome coronavirus 2
RFVLALLSDLQDL

SEQ ID NO: 17252 - protein, 15 aa, Severe acute respiratory syndrome-related coronavirus
  REGION 1..15: note = Table B: HLA-DRB1*04:05L HLA-DRB1*01:02L HLA-DRB1*14:01L HLA-DRB1*12:01L HLA-DPA1*02:01-B1*13:01L HLA-DQA1*03:01-B1*03:02L HLA-DRB1*15:03L
  source 1..15: note = Severe acute respiratory syndrome coronavirus 2
TPKGPKVKYLYFIKG

SEQ ID NO: 17253 - protein, 14 aa, Severe acute respiratory syndrome-related coronavirus
  REGION 1..14: note = Table B: HLA-DRB1*04:05L HLA-DQA1*01:02-B1*06:02L HLA-DRB1*01:02L HLA-DRB1*08:04L HLA-DPA1*03:01-B1*04:02L HLA-DRB1*14:01L HLA-DRB1*11:04L HLA-DRB1*11:01L HLA-DRB1*12:01L HLA-DPA1*02:01-B1*13:01L HLA-DPA1*03:01-B1*105:01L
  REGION 1..14: note = CONT. FROM ABOVE: HLA-DPA1*01:03-B1*02:01L HLA-DRB1*15:03L
  source 1..14: note = Severe acute respiratory syndrome coronavirus 2
GPKVKYLYFIKGLN

SEQ ID NO: 17254 - protein, 12 aa, Severe acute respiratory syndrome-related coronavirus
  REGION 1..12: note = Table B: HLA-DRB1*04:05L HLA-DRB1*01:02L
  source 1..12: note = Severe acute respiratory syndrome coronavirus 2
LYFIKGLNNLNR

SEQ ID NO: 17255 - protein, 11 aa, Severe acute respiratory syndrome-related coronavirus
  REGION 1..11: note = Table B: HLA-DRB1*04:05L HLA-DRB1*01:01L HLA-DRB1*08:04L HLA-DPA1*01:03-B1*03:01L HLA-DPA1*03:01-B1*04:02L HLA-DRB1*14:01L HLA-DRB1*14:02L HLA-DRB5*01:01L HLA-DPA1*01:03-B1*04:01L HLA-DRB1*04:10L
  REGION 1..11: note = CONT. FROM ABOVE: HLA-DPA1*03:01-B1*105:01L HLA-DQA1*03:01-B1*03 :02L HLA-DRB1*14:54L HLA-DQA1*05:05-B1*03:01L HLA-DRB1*14:17L HL A-DQA1*01:03-B1*06:01L HLA-DRB1*04:08L
  source 1..11: note = Severe acute respiratory syndrome coronavirus 2
DYLASGGQPIT

SEQ ID NO: 17256 - protein, 11 aa, Severe acute respiratory syndrome-related coronavirus
  REGION 1..11: note = Table B: HLA-DRB1*04:05L HLA-DRB1*01:01L HLA-DPA1*01:03-B1*03:01L HLA-DPA1*03:01-B1*04:02L HLA-DRB1*14:01L HLA-DRB1*14:02L HLA-DRB5*01:01L HLA-DPA1*03:01-B1*105:01L HLA-DRB1*14:54L
  REGION 1..11: note = CONT. FROM ABOVE: HLA-DPA1*01:02-B1*04:01L HLA-DRB1*10:01L HLA-D RB1*04:08L
  source 1..11: note = Severe acute respiratory syndrome coronavirus 2
YLASGGQPITN

SEQ ID NO: 17257 - protein, 14 aa, Severe acute respiratory syndrome-related coronavirus
  REGION 1..14: note = Table B: HLA-DRB1*04:05L
  source 1..14: note = Severe acute respiratory syndrome coronavirus 2
TPEANMDQESFGGA

SEQ ID NO: 17258 - protein, 13 aa, Severe acute respiratory syndrome-related coronavirus
  REGION 1..13: note = Table B: HLA-DRB1*04:05L HLA-DRB1*16:01L
  source 1..13: note = Severe acute respiratory syndrome coronavirus 2
LKGKYVQIPTTCA

SEQ ID NO: 17259 - protein, 12 aa, Severe acute respiratory syndrome-related coronavirus
  REGION 1..12: note = Table B: HLA-DRB1*04:05L HLA-DQA1*05:01-B1*02:01L HLA-DRB1*04:08L
  source 1..12: note = Severe acute respiratory syndrome coronavirus 2
YRAFDIYNDKVA

SEQ ID NO: 17260 - protein, 13 aa, Severe acute respiratory syndrome-related coronavirus
  REGION 1..13: note = Table B: HLA-DRB1*04:05L HLA-DRB3*01:01L
  source 1..13: note = Severe acute respiratory syndrome coronavirus 2
DNLIDSYFVVKRH

SEQ ID NO: 17261 - protein, 13 aa, Severe acute respiratory syndrome-related coronavirus
  REGION 1..13: note = Table B: HLA-DRB1*04:05L
  source 1..13: note = Severe acute respiratory syndrome coronavirus 2
NLIDSYFVVKRHT

SEQ ID NO: 17262 - protein, 13 aa, Severe acute respiratory syndrome-related coronavirus
  REGION 1..13: note = Table B: HLA-DRB1*04:05L
  source 1..13: note = Severe acute respiratory syndrome coronavirus 2
FVVKRHTFSNYQH

SEQ ID NO: 17263 - protein, 13 aa, Severe acute respiratory syndrome-related coronavirus
  REGION 1..13: note = Table B: HLA-DRB1*04:05L HLA-DRB1*08:01L HLA-DRB1*12:01L HLA-DPA1*02:01-B1*13:01L HLA-DQA1*03:01-B1*03:02L HLA-DPA1*01:02-B1*04:01L HLA-DRB1*15:03L
  source 1..13: note = Severe acute respiratory syndrome coronavirus 2
VVKRHTFSNYQHE

SEQ ID NO: 17264 - protein, 11 aa, Severe acute respiratory syndrome-related coronavirus
  REGION 1..11: note = Table B: HLA-DRB1*04:05L HLA-DRB4*03:01NL HLA-DQA1*01:01-B1*05:01L HLA-DRB1*04:10L HLA-DRB1*12:01L HLA-DRB1*14:54L HLA-DRB1*04:08L
  source 1..11: note = Severe acute respiratory syndrome coronavirus 2
SNYQHEETIYN

SEQ ID NO: 17265 - protein, 12 aa, Severe acute respiratory syndrome-related coronavirus
  REGION 1..12: note = Table B: HLA-DRB1*04:05L HLA-DRB1*16:01L HLA-DRB1*04:08L
  source 1..12: note = Severe acute respiratory syndrome coronavirus 2
TIYNLLKDCPAV

SEQ ID NO: 17266 - protein, 12 aa, Severe acute respiratory syndrome-related coronavirus
  REGION 1..12: note = Table B: HLA-DRB1*04:05L HLA-DRB1*01:02L HLA-DRB3*01:01L HLA-DRB1*04:08L HLA-DRB1*15:03L
  source 1..12: note = Severe acute respiratory syndrome coronavirus 2
GDMVPHISRQRL

SEQ ID NO: 17267 - protein, 13 aa, Severe acute respiratory syndrome-related coronavirus
  REGION 1..13: note = Table B: HLA-DRB1*04:05L HLA-DRB1*12:01L HLA-DPA1*02:01-B1*13:01L
  source 1..13: note = Severe acute respiratory syndrome coronavirus 2
SRQRLTKYTMADL

SEQ ID NO: 17268 - protein, 14 aa, Severe acute respiratory syndrome-related coronavirus
  REGION 1..14: note = Table B: HLA-DRB1*04:05L HLA-DRB1*01:02L HLA-DRB1*12:01L HLA-DPA1*02:01-B1*13:01L HLA-DRB1*16:01L
  source 1..14: note = Severe acute respiratory syndrome coronavirus 2
RQRLTKYTMADLVY

SEQ ID NO: 17269 - protein, 13 aa, Severe acute respiratory syndrome-related coronavirus
  REGION 1..13: note = Table B: HLA-DRB1*04:05L HLA-DRB1*01:02L HLA-DRB1*12:01L HLA-DPA1*02:01-B1*13:01L HLA-DRB1*16:01L
  source 1..13: note = Severe acute respiratory syndrome coronavirus 2
RLTKYTMADLVYA

SEQ ID NO: 17270 - protein, 14 aa, Severe acute respiratory syndrome-related coronavirus
  REGION 1..14: note = Table B: HLA-DRB1*04:05L HLA-DRB1*15:03L
  source 1..14: note = Severe acute respiratory syndrome coronavirus 2
KEILVTYNCCDDDY

SEQ ID NO: 17271 - protein, 11 aa, Severe acute respiratory syndrome-related coronavirus
  REGION 1..11: note = Table B: HLA-DRB1*04:05L HLA-DPA1*03:01-B1*105:01L HLA-DRB1*16:01L
  source 1..11: note = Severe acute respiratory syndrome coronavirus 2
DYFNKKDWYDF

SEQ ID NO: 17272 - protein, 13 aa, Severe acute respiratory syndrome-related coronavirus
  REGION 1..13: note = Table B: HLA-DRB1*04:05L HLA-DRB1*12:01L HLA-DRB1*04:08L HLA-DRB1*15:03L
  source 1..13: note = Severe acute respiratory syndrome coronavirus 2
GERVRQALLKTVQ

SEQ ID NO: 17273 - protein, 14 aa, Severe acute respiratory syndrome-related coronavirus
  REGION 1..14: note = Table B: HLA-DRB1*04:05L HLA-DRB1*08:77L HLA-DPA1*01:03-B1*03:01L HLA-DRB1*14:02L HLA-DRB1*08:01L HLA-DPA1*01:03-B1*04:02L HLA-DPA1*01:03-B1*104:01L HLA-DRB1*07:01L HLA-DRB1*15:03L
  source 1..14: note = Severe acute respiratory syndrome coronavirus 2
FIQTTPGSGVPVVD

SEQ ID NO: 17274 - protein, 14 aa, Severe acute respiratory syndrome-related coronavirus
  REGION 1..14: note = Table B: HLA-DRB1*04:05L HLA-DPA1*02:01-B1*13:01L
  source 1..14: note = Severe acute respiratory syndrome coronavirus 2
RALTAESHVDTDLT

SEQ ID NO: 17275 - protein, 15 aa, Severe acute respiratory syndrome-related coronavirus
  REGION 1..15: note = Table B: HLA-DRB1*04:05L HLA-DRB1*08:04L HLA-DPA1*03:01-B1*04:02L HLA-DRB1*11:01L HLA-DRB1*13:01L HLA-DPA1*03:01-B1*105:01L
  source 1..15: note = Severe acute respiratory syndrome coronavirus 2
ERLKLFDRYFKYWDQ

SEQ ID NO: 17276 - protein, 15 aa, Severe acute respiratory syndrome-related coronavirus
  REGION 1..15: note = Table B: HLA-DRB1*04:05L HLA-DPA1*01:03-B1*104:01L HLA-DRB1*04:08L
  source 1..15: note = Severe acute respiratory syndrome coronavirus 2
VLFSTVFPPTSFGPL

SEQ ID NO: 17277 - protein, 13 aa, Severe acute respiratory syndrome-related coronavirus
  REGION 1..13: note = Table B: HLA-DRB1*04:05L HLA-DRB1*08:01L HLA-DRB1*12:01L HLA-DRB1*04:08L
  source 1..13: note = Severe acute respiratory syndrome coronavirus 2
VFPPTSFGPLVRK

SEQ ID NO: 17278 - protein, 12 aa, Severe acute respiratory syndrome-related coronavirus
  REGION 1..12: note = Table B: HLA-DRB1*04:05L HLA-DRB1*01:02L HLA-DRB1*12:01L
  source 1..12: note = Severe acute respiratory syndrome coronavirus 2
GYHFRELGVVHN

SEQ ID NO: 17279 - protein, 12 aa, Severe acute respiratory syndrome-related coronavirus
  REGION 1..12: note = Table B: HLA-DRB1*04:05L HLA-DRB1*01:02L
  source 1..12: note = Severe acute respiratory syndrome coronavirus 2
YHFRELGVVHNQ

SEQ ID NO: 17280 - protein, 14 aa, Severe acute respiratory syndrome-related coronavirus
  REGION 1..14: note = Table B: HLA-DRB1*04:05L
  source 1..14: note = Severe acute respiratory syndrome coronavirus 2
MHAASGNLLLDKRT

SEQ ID NO: 17281 - protein, 15 aa, Severe acute respiratory syndrome-related coronavirus
  REGION 1..15: note = Table B: HLA-DRB1*04:05L HLA-DRB1*01:02L HLA-DRB1*12:01L HLA-DPA1*01:03-B1*104:01L HLA-DQA1*01:03-B1*06:01L
  source 1..15: note = Severe acute respiratory syndrome coronavirus 2
LDKRTTCFSVAALTN

SEQ ID NO: 17282 - protein, 15 aa, Severe acute respiratory syndrome-related coronavirus
  REGION 1..15: note = Table B: HLA-DRB1*04:05L HLA-DRB1*08:04L HLA-DPA1*01:03-B1*04:02L HLA-DPA1*02:01-B1*13:01L HLA-DRB1*04:08L
  source 1..15: note = Severe acute respiratory syndrome coronavirus 2
FQTVKPGNFNKDFYD

SEQ ID NO: 17283 - protein, 13 aa, Severe acute respiratory syndrome-related coronavirus
  REGION 1..13: note = Table B: HLA-DRB1*04:05L HLA-DRB1*12:01L HLA-DPA1*02:01-B1*13:01L HLA-DRB1*04:08L HLA-DRB1*15:03L
  source 1..13: note = Severe acute respiratory syndrome coronavirus 2
NFNKDFYDFAVSK

SEQ ID NO: 17284 - protein, 11 aa, Severe acute respiratory syndrome-related coronavirus
  REGION 1..11: note = Table B: HLA-DRB1*04:05L HLA-DQA1*01-B1*05L HLA-DQA1*03:01-B1*03:02L HLA-DRB1*14:17L
  source 1..11: note = Severe acute respiratory syndrome coronavirus 2
HFFFAQDGNAA

SEQ ID NO: 17285 - protein, 14 aa, Severe acute respiratory syndrome-related coronavirus
  REGION 1..14: note = Table B: HLA-DRB1*04:05L HLA-DRB3*01:01L
  source 1..14: note = Severe acute respiratory syndrome coronavirus 2
GNAAISDYDYYRYN

SEQ ID NO: 17286 - protein, 15 aa, Severe acute respiratory syndrome-related coronavirus
  REGION 1..15: note = Table B: HLA-DRB1*04:05L HLA-DRB1*08:04L
  source 1..15: note = Severe acute respiratory syndrome coronavirus 2
AAISDYDYYRYNLPT

SEQ ID NO: 17287 - protein, 12 aa, Severe acute respiratory syndrome-related coronavirus
  REGION 1..12: note = Table B: HLA-DRB1*04:05L
  source 1..12: note = Severe acute respiratory syndrome coronavirus 2
RQLLFVVEVVDK

SEQ ID NO: 17288 - protein, 12 aa, Severe acute respiratory syndrome-related coronavirus
  REGION 1..12: note = Table B: HLA-DRB1*04:05L HLA-DRB1*08:04L HLA-DRB3*02:01L HLA-DPA1*01:03-B1*03:01L HLA-DRB1*11:03L HLA-DQA1*01:01-B1*05:01L HLA-DQA1*01-B1*05L HLA-DQA1*05:05-B1*03:19L HLA-DRB1*04:10L
  REGION 1..12: note = CONT. FROM ABOVE: HLA-DPA1*01:03-B1*04:02L HLA-DRB1*12:02L HLA-D PA1*02:01-B1*13:01L HLA-DPA1*01:03-B1*104:01L HLA-DRB1*04:08L
  source 1..12: note = Severe acute respiratory syndrome coronavirus 2
INANQVIVNNLD

SEQ ID NO: 17289 - protein, 15 aa, Severe acute respiratory syndrome-related coronavirus
  REGION 1..15: note = Table B: HLA-DRB1*04:05L HLA-DRB1*12:01L
  source 1..15: note = Severe acute respiratory syndrome coronavirus 2
DKSAGFPFNKWGKAR

SEQ ID NO: 17290 - protein, 14 aa, Severe acute respiratory syndrome-related coronavirus
  REGION 1..14: note = Table B: HLA-DRB1*04:05L HLA-DRB1*11:01L HLA-DRB3*01:01L
  source 1..14: note = Severe acute respiratory syndrome coronavirus 2
AGFPFNKWGKARLY

SEQ ID NO: 17291 - protein, 13 aa, Severe acute respiratory syndrome-related coronavirus
  REGION 1..13: note = Table B: HLA-DRB1*04:05L HLA-DRB1*16:01L
  source 1..13: note = Severe acute respiratory syndrome coronavirus 2
KARLYYDSMSYED

SEQ ID NO: 17292 - protein, 13 aa, Severe acute respiratory syndrome-related coronavirus
  REGION 1..13: note = Table B: HLA-DRB1*04:05L HLA-DQA1*01:03-B1*06:01L
  source 1..13: note = Severe acute respiratory syndrome coronavirus 2
LYYDSMSYEDQDA

SEQ ID NO: 17293 - protein, 12 aa, Severe acute respiratory syndrome-related coronavirus
  REGION 1..12: note = Table B: HLA-DRB1*04:05L HLA-DRB1*01:02L HLA-DRB1*04:10L
  source 1..12: note = Severe acute respiratory syndrome coronavirus 2
NVIPTITQMNLK

SEQ ID NO: 17294 - protein, 13 aa, Severe acute respiratory syndrome-related coronavirus
  REGION 1..13: note = Table B: HLA-DRB1*04:05L HLA-DRB1*01:02L
  source 1..13: note = Severe acute respiratory syndrome coronavirus 2
VIPTITQMNLKYA

SEQ ID NO: 17295 - protein, 12 aa, Severe acute respiratory syndrome-related coronavirus
  REGION 1..12: note = Table B: HLA-DRB1*04:05L HLA-DQA1*01:02-B1*06:02L HLA-DRB1*01:02L HLA-DRB1*12:01L
  source 1..12: note = Severe acute respiratory syndrome coronavirus 2
QMNLKYAISAKN

SEQ ID NO: 17296 - protein, 13 aa, Severe acute respiratory syndrome-related coronavirus
  REGION 1..13: note = Table B: HLA-DRB1*04:05L HLA-DRB1*12:01L HLA-DPA1*02:01-B1*13:01L
  source 1..13: note = Severe acute respiratory syndrome coronavirus 2
AKNRARTVAGVSI

SEQ ID NO: 17297 - protein, 14 aa, Severe acute respiratory syndrome-related coronavirus
  REGION 1..14: note = Table B: HLA-DRB1*04:05L HLA-DRB1*14:01L HLA-DRB1*11:04L HLA-DRB1*11:01L HLA-DRB3*01:01L HLA-DPA1*01:03-B1*02:01L HLA-DRB1*15:03L
  source 1..14: note = Severe acute respiratory syndrome coronavirus 2
NRQFHQKLLKSIAA

SEQ ID NO: 17298 - protein, 12 aa, Severe acute respiratory syndrome-related coronavirus
  REGION 1..12: note = Table B: HLA-DRB1*04:05L HLA-DRB1*01:02L HLA-DPA1*03:01-B1*105:01L HLA-DRB1*04:08L
  source 1..12: note = Severe acute respiratory syndrome coronavirus 2
TRGATVVIGTSK

SEQ ID NO: 17299 - protein, 14 aa, Severe acute respiratory syndrome-related coronavirus
  REGION 1..14: note = Table B: HLA-DRB1*04:05L HLA-DRB1*12:01L
  source 1..14: note = Severe acute respiratory syndrome coronavirus 2
GTSKFYGGWHNMLK

SEQ ID NO: 17300 - protein, 14 aa, Severe acute respiratory syndrome-related coronavirus
  REGION 1..14: note = Table B: HLA-DRB1*04:05L HLA-DPA1*02:01-B1*13:01L HLA-DQA1*03:01-B1*03:02L HLA-DRB1*16:01L HLA-DRB1*04:08L HLA-DRB1*15:03L
  source 1..14: note = Severe acute respiratory syndrome coronavirus 2
HNMLKTVYSDVENP

SEQ ID NO: 17301 - protein, 12 aa, Severe acute respiratory syndrome-related coronavirus
  REGION 1..12: note = Table B: HLA-DRB1*04:05L HLA-DQA1*01:02-B1*06:02L HLA-DRB1*04:08L
  source 1..12: note = Severe acute respiratory syndrome coronavirus 2
LRIMASLVLARK

SEQ ID NO: 17302 - protein, 13 aa, Severe acute respiratory syndrome-related coronavirus
  REGION 1..13: note = Table B: HLA-DRB1*04:05L HLA-DRB1*12:01L HLA-DPA1*02:01-B1*13:01L
  source 1..13: note = Severe acute respiratory syndrome coronavirus 2
VLARKHTTCCSLS

SEQ ID NO: 17303 - protein, 12 aa, Severe acute respiratory syndrome-related coronavirus
  REGION 1..12: note = Table B: HLA-DRB1*04:05L HLA-DRB1*01:02L HLA-DRB1*12:01L HLA-DPA1*02:01-B1*13:01L
  source 1..12: note = Severe acute respiratory syndrome coronavirus 2
ARKHTTCCSLSH

SEQ ID NO: 17304 - protein, 12 aa, Severe acute respiratory syndrome-related coronavirus
  REGION 1..12: note = Table B: HLA-DRB1*04:05L HLA-DRB1*01:02L HLA-DRB1*12:01L
  source 1..12: note = Severe acute respiratory syndrome coronavirus 2
RKHTTCCSLSHR

SEQ ID NO: 17305 - protein, 15 aa, Severe acute respiratory syndrome-related coronavirus
  REGION 1..15: note = Table B: HLA-DRB1*04:05L HLA-DPA1*01:03-B1*03:01L HLA-DRB1*12:01L HLA-DRB1*16:01L HLA-DQA1*01:03-B1*06:01L
  source 1..15: note = Severe acute respiratory syndrome coronavirus 2
GSLYVKPGGTSSGDA

SEQ ID NO: 17306 - protein, 17 aa, Severe acute respiratory syndrome-related coronavirus
  REGION 1..17: note = Table B: HLA-DRB1*04:05L HLA-DRB1*14:17L
  source 1..17: note = Severe acute respiratory syndrome coronavirus 2
VKPGGTSSGDATTAYAN

SEQ ID NO: 17307 - protein, 13 aa, Severe acute respiratory syndrome-related coronavirus
  REGION 1..13: note = Table B: HLA-DRB1*04:05L HLA-DRB4*03:01NL HLA-DRB1*04:10L HLA-DRB1*14:54L
  source 1..13: note = Severe acute respiratory syndrome coronavirus 2
ANVNALLSTDGNK

SEQ ID NO: 17308 - protein, 11 aa, Severe acute respiratory syndrome-related coronavirus
  REGION 1..11: note = Table B: HLA-DRB1*04:05L HLA-DRB1*11:03L HLA-DRB1*14:02L HLA-DRB1*11:01L HLA-DQA1*05:05-B1*03:116L HLA-DRB1*14:54L HLA-DPA1*01:02-B1*04:01L HLA-DRB1*08:02L
  source 1..11: note = Severe acute respiratory syndrome coronavirus 2
STDGNKIADKY

SEQ ID NO: 17309 - protein, 12 aa, Severe acute respiratory syndrome-related coronavirus
  REGION 1..12: note = Table B: HLA-DRB1*04:05L HLA-DRB1*01:02L HLA-DRB1*12:01L HLA-DPA1*02:01-B1*13:01L HLA-DQA1*02:01-B1*03:03L
  source 1..12: note = Severe acute respiratory syndrome coronavirus 2
DGNKIADKYVRN

SEQ ID NO: 17310 - protein, 14 aa, Severe acute respiratory syndrome-related coronavirus
  REGION 1..14: note = Table B: HLA-DRB1*04:05L HLA-DRB1*12:01L HLA-DRB3*01:01L
  source 1..14: note = Severe acute respiratory syndrome coronavirus 2
NKIADKYVRNLQHR

SEQ ID NO: 17311 - protein, 12 aa, Severe acute respiratory syndrome-related coronavirus
  REGION 1..12: note = Table B: HLA-DRB1*04:05L HLA-DRB1*12:01L
  source 1..12: note = Severe acute respiratory syndrome coronavirus 2
LQHRLYECLYRN

SEQ ID NO: 17312 - protein, 12 aa, Severe acute respiratory syndrome-related coronavirus
  REGION 1..12: note = Table B: HLA-DRB1*04:05L HLA-DRB1*12:01L
  source 1..12: note = Severe acute respiratory syndrome coronavirus 2
QHRLYECLYRNR

SEQ ID NO: 17313 - protein, 14 aa, Severe acute respiratory syndrome-related coronavirus
  REGION 1..14: note = Table B: HLA-DRB1*04:05L HLA-DPA1*02:01-B1*13:01L HLA-DRB1*16:01L
  source 1..14: note = Severe acute respiratory syndrome coronavirus 2
LYECLYRNRDVDTD

SEQ ID NO: 17314 - protein, 12 aa, Severe acute respiratory syndrome-related coronavirus
  REGION 1..12: note = Table B: HLA-DRB1*04:05L HLA-DRB1*08:01L HLA-DPA1*02:01-B1*13:01L HLA-DRB1*16:01L HLA-DRB1*04:08L
  source 1..12: note = Severe acute respiratory syndrome coronavirus 2
YRNRDVDTDFVN

SEQ ID NO: 17315 - protein, 13 aa, Severe acute respiratory syndrome-related coronavirus
  REGION 1..13: note = Table B: HLA-DRB1*04:05L HLA-DRB1*01:02L HLA-DPA1*01:03-B1*03:01L HLA-DRB1*12:01L HLA-DPA1*02:01-B1*13:01L HLA-DPA1*03:01-B1*105:01L HLA-DQA1*03:01-B1*03:02L HLA-DPA1*01:02-B1*04:01L
  REGION 1..13: note = CONT. FROM ABOVE: HLA-DRB1*16:01L HLA-DQA1*01:03-B1*06:01L HLA-D QA1*02:01-B1*03:03L HLA-DRB1*15:03L
  source 1..13: note = Severe acute respiratory syndrome coronavirus 2
LRKHFSMMILSDD

SEQ ID NO: 17316 - protein, 13 aa, Severe acute respiratory syndrome-related coronavirus
  REGION 1..13: note = Table B: HLA-DRB1*04:05L HLA-DRB1*01:02L HLA-DRB1*08:01L HLA-DRB1*12:01L HLA-DPA1*02:01-B1*13:01L HLA-DRB1*16:01L HLA-DRB1*04:08L
  source 1..13: note = Severe acute respiratory syndrome coronavirus 2
RKHFSMMILSDDA

SEQ ID NO: 17317 - protein, 14 aa, Severe acute respiratory syndrome-related coronavirus
  REGION 1..14: note = Table B: HLA-DRB1*04:05L HLA-DPA1*02:01-B1*13:01L HLA-DRB1*15:03L
  source 1..14: note = Severe acute respiratory syndrome coronavirus 2
KHFSMMILSDDAVV

SEQ ID NO: 17318 - protein, 13 aa, Severe acute respiratory syndrome-related coronavirus
  REGION 1..13: note = Table B: HLA-DRB1*04:05L HLA-DPA1*01:03-B1*04:01L HLA-DPA1*01:03-B1*04:02L HLA-DQA1*05:05-B1*03:01L HLA-DRB1*04:08L
  source 1..13: note = Severe acute respiratory syndrome coronavirus 2
NFKSVLYYQNNVF

SEQ ID NO: 17319 - protein, 15 aa, Severe acute respiratory syndrome-related coronavirus
  REGION 1..15: note = Table B: HLA-DRB1*04:05L
  source 1..15: note = Severe acute respiratory syndrome coronavirus 2
EAKCWTETDLTKGPH

SEQ ID NO: 17320 - protein, 13 aa, Severe acute respiratory syndrome-related coronavirus
  REGION 1..13: note = Table B: HLA-DRB1*04:05L HLA-DRB1*08:01L HLA-DRB1*04:10L HLA-DPA1*03:01-B1*105:01L HLA-DRB1*04:08L
  source 1..13: note = Severe acute respiratory syndrome coronavirus 2
AGCFVDDIVKTDG

SEQ ID NO: 17321 - protein, 13 aa, Severe acute respiratory syndrome-related coronavirus
  REGION 1..13: note = Table B: HLA-DRB1*04:05L HLA-DPA1*01:03-B1*04:02L HLA-DPA1*01:03-B1*104:01L HLA-DPA1*01:02-B1*04:01L HLA-DRB1*04:08L
  source 1..13: note = Severe acute respiratory syndrome coronavirus 2
ERFVSLAIDAYPL

SEQ ID NO: 17322 - protein, 13 aa, Severe acute respiratory syndrome-related coronavirus
  REGION 1..13: note = Table B: HLA-DRB1*04:05L HLA-DRB3*01:01L HLA-DRB1*14:54L HLA-DRB1*04:08L
  source 1..13: note = Severe acute respiratory syndrome coronavirus 2
YPLTKHPNQEYAD

SEQ ID NO: 17323 - protein, 12 aa, Severe acute respiratory syndrome-related coronavirus
  REGION 1..12: note = Table B: HLA-DRB1*04:05L HLA-DRB1*04:10L
  source 1..12: note = Severe acute respiratory syndrome coronavirus 2
MYSVMLTNDNTS

SEQ ID NO: 17324 - protein, 14 aa, Severe acute respiratory syndrome-related coronavirus
  REGION 1..14: note = Table B: HLA-DRB1*04:05L HLA-DRB1*01:02L HLA-DRB1*12:01L HLA-DRB1*04:08L
  source 1..14: note = Severe acute respiratory syndrome coronavirus 2
IRRPFLCCKCCYDH

SEQ ID NO: 17325 - protein, 12 aa, Severe acute respiratory syndrome-related coronavirus
  REGION 1..12: note = Table B: HLA-DRB1*04:05L HLA-DRB1*01:02L HLA-DQA1*01:01-B1*05:01L
  source 1..12: note = Severe acute respiratory syndrome coronavirus 2
AETLKATEETFK

SEQ ID NO: 17326 - protein, 13 aa, Severe acute respiratory syndrome-related coronavirus
  REGION 1..13: note = Table B: HLA-DRB1*04:05L HLA-DRB1*04:08L
  source 1..13: note = Severe acute respiratory syndrome coronavirus 2
KLSYGIATVREVL

SEQ ID NO: 17327 - protein, 13 aa, Severe acute respiratory syndrome-related coronavirus
  REGION 1..13: note = Table B: HLA-DRB1*04:05L HLA-DRB1*14:01L HLA-DRB1*04:08L
  source 1..13: note = Severe acute respiratory syndrome coronavirus 2
LSYGIATVREVLS

SEQ ID NO: 17328 - protein, 13 aa, Severe acute respiratory syndrome-related coronavirus
  REGION 1..13: note = Table B: HLA-DRB1*04:05L HLA-DRB1*08:01L HLA-DRB1*04:08L
  source 1..13: note = Severe acute respiratory syndrome coronavirus 2
YGIATVREVLSDR

SEQ ID NO: 17329 - protein, 12 aa, Severe acute respiratory syndrome-related coronavirus
  REGION 1..12: note = Table B: HLA-DRB1*04:05L
  source 1..12: note = Severe acute respiratory syndrome coronavirus 2
ATVREVLSDREL

SEQ ID NO: 17330 - protein, 15 aa, Severe acute respiratory syndrome-related coronavirus
  REGION 1..15: note = Table B: HLA-DRB1*04:05L HLA-DRB1*01:02L HLA-DRB1*12:01L
  source 1..15: note = Severe acute respiratory syndrome coronavirus 2
LSDRELHLSWEVGKP

SEQ ID NO: 17331 - protein, 14 aa, Severe acute respiratory syndrome-related coronavirus
  REGION 1..14: note = Table B: HLA-DRB1*04:05L
  source 1..14: note = Severe acute respiratory syndrome coronavirus 2
ELHLSWEVGKPRPP

SEQ ID NO: 17332 - protein, 16 aa, Severe acute respiratory syndrome-related coronavirus
  REGION 1..16: note = Table B: HLA-DRB1*04:05L HLA-DRB1*11:04L HLA-DRB1*12:01L HLA-DPA1*02:01-B1*13:01L
  source 1..16: note = Severe acute respiratory syndrome coronavirus 2
KPRPPLNRNYVFTGYR

SEQ ID NO: 17333 - protein, 13 aa, Severe acute respiratory syndrome-related coronavirus
  REGION 1..13: note = Table B: HLA-DRB1*04:05L
  source 1..13: note = Severe acute respiratory syndrome coronavirus 2
YVFTGYRVTKNSK

SEQ ID NO: 17334 - protein, 13 aa, Severe acute respiratory syndrome-related coronavirus
  REGION 1..13: note = Table B: HLA-DRB1*04:05L HLA-DPA1*01:03-B1*03:01L HLA-DRB1*08:01L HLA-DRB1*04:10L HLA-DRB1*12:01L
  source 1..13: note = Severe acute respiratory syndrome coronavirus 2
DYGDAVVYRGTTT

SEQ ID NO: 17335 - protein, 12 aa, Severe acute respiratory syndrome-related coronavirus
  REGION 1..12: note = Table B: HLA-DRB1*04:05L HLA-DRB1*14:54L HLA-DRB1*04:08L
  source 1..12: note = Severe acute respiratory syndrome coronavirus 2
DAVVYRGTTTYK

SEQ ID NO: 17336 - protein, 12 aa, Severe acute respiratory syndrome-related coronavirus
  REGION 1..12: note = Table B: HLA-DRB1*04:05L HLA-DQA1*01:02-B1*06:02L HLA-DPA1*01:03-B1*03:01L HLA-DRB1*11:03L HLA-DRB1*14:02L HLA-DQA1*05:05-B1*03:19L HLA-DQA1*05:01-B1*02:01L HLA-DPA1*01:03-B1*04:01L HLA-DRB1*09:01L
  REGION 1..12: note = CONT. FROM ABOVE: HLA-DPA1*02:01-B1*13:01L
  source 1..12: note = Severe acute respiratory syndrome coronavirus 2
VVYRGTTTYKLN

SEQ ID NO: 17337 - protein, 13 aa, Severe acute respiratory syndrome-related coronavirus
  REGION 1..13: note = Table B: HLA-DRB1*04:05L HLA-DRB1*08:04L HLA-DRB3*02:01L HLA-DPA1*03:01-B1*04:02L HLA-DRB1*08:01L HLA-DRB1*12:02L
  source 1..13: note = Severe acute respiratory syndrome coronavirus 2
SSNVANYQKVGMQ

SEQ ID NO: 17338 - protein, 11 aa, Severe acute respiratory syndrome-related coronavirus
  REGION 1..11: note = Table B: HLA-DRB1*04:05L HLA-DRB1*14:17L
  source 1..11: note = Severe acute respiratory syndrome coronavirus 2
QKYSTLQGPPG

SEQ ID NO: 17339 - protein, 13 aa, Severe acute respiratory syndrome-related coronavirus
  REGION 1..13: note = Table B: HLA-DRB1*04:05L HLA-DRB1*01:02L HLA-DRB1*12:01L HLA-DPA1*02:01-B1*13:01L HLA-DRB1*04:08L
  source 1..13: note = Severe acute respiratory syndrome coronavirus 2
SARIVYTACSHAA

SEQ ID NO: 17340 - protein, 12 aa, Severe acute respiratory syndrome-related coronavirus
  REGION 1..12: note = Table B: HLA-DRB1*04:05L HLA-DRB1*01:02L HLA-DRB1*08:01L HLA-DRB1*12:01L HLA-DPA1*03:01-B1*105:01L HLA-DRB1*15:03L
  source 1..12: note = Severe acute respiratory syndrome coronavirus 2
ALKYLPIDKCSR

SEQ ID NO: 17341 - protein, 15 aa, Severe acute respiratory syndrome-related coronavirus
  REGION 1..15: note = Table B: HLA-DRB1*04:05L HLA-DQA1*05:05-B1*03:19L HLA-DRB1*12:01L HLA-DPA1*02:01-B1*13:01L HLA-DRB1*15:03L
  source 1..15: note = Severe acute respiratory syndrome coronavirus 2
LPIDKCSRIIPARAR

SEQ ID NO: 17342 - protein, 13 aa, Severe acute respiratory syndrome-related coronavirus
  REGION 1..13: note = Table B: HLA-DRB1*04:05L HLA-DQA1*01:02-B1*06:02L HLA-DRB3*02:01L
  source 1..13: note = Severe acute respiratory syndrome coronavirus 2
TADIVVFDEISMA

SEQ ID NO: 17343 - protein, 13 aa, Severe acute respiratory syndrome-related coronavirus
  REGION 1..13: note = Table B: HLA-DRB1*04:05L HLA-DRB1*01:02L HLA-DRB1*04:10L HLA-DQA1*05:05-B1*03:01L HLA-DQA1*01:03-B1*06:01L HLA-DRB1*04:08L
  source 1..13: note = Severe acute respiratory syndrome coronavirus 2
VVFDEISMATNYD

SEQ ID NO: 17344 - protein, 12 aa, Severe acute respiratory syndrome-related coronavirus
  REGION 1..12: note = Table B: HLA-DRB1*04:05L HLA-DQA1*01:02-B1*06:02L HLA-DRB1*01:02L HLA-DRB4*03:01NL HLA-DRB1*04:10L HLA-DRB1*14:54L HLA-DQA1*05:05-B1*03:01L HLA-DQA1*01:03-B1*06:01L
  source 1..12: note = Severe acute respiratory syndrome coronavirus 2
DEISMATNYDLS

SEQ ID NO: 17345 - protein, 13 aa, Severe acute respiratory syndrome-related coronavirus
  REGION 1..13: note = Table B: HLA-DRB1*04:05L HLA-DQA1*01:01-B1*05:01L HLA-DRB1*15:03L
  source 1..13: note = Severe acute respiratory syndrome coronavirus 2
TNYDLSVVNARLR

SEQ ID NO: 17346 - protein, 13 aa, Severe acute respiratory syndrome-related coronavirus
  REGION 1..13: note = Table B: HLA-DRB1*04:05L HLA-DRB1*14:01L
  source 1..13: note = Severe acute respiratory syndrome coronavirus 2
YDLSVVNARLRAK

SEQ ID NO: 17347 - protein, 13 aa, Severe acute respiratory syndrome-related coronavirus
  REGION 1..13: note = Table B: HLA-DRB1*04:05L HLA-DRB1*01:02L HLA-DRB1*12:01L
  source 1..13: note = Severe acute respiratory syndrome coronavirus 2
VVREFLTRNPAWR

SEQ ID NO: 17348 - protein, 12 aa, Severe acute respiratory syndrome-related coronavirus
  REGION 1..12: note = Table B: HLA-DRB1*04:05L HLA-DRB1*01:02L HLA-DRB1*14:01L HLA-DRB1*12:01L
  source 1..12: note = Severe acute respiratory syndrome coronavirus 2
REFLTRNPAWRK

SEQ ID NO: 17349 - protein, 12 aa, Severe acute respiratory syndrome-related coronavirus
  REGION 1..12: note = Table B: HLA-DRB1*04:05L HLA-DRB1*04:10L HLA-DRB1*16:01L HLA-DRB1*15:03L
  source 1..12: note = Severe acute respiratory syndrome coronavirus 2
AVFISPYNSQNA

SEQ ID NO: 17350 - protein, 14 aa, Severe acute respiratory syndrome-related coronavirus
  REGION 1..14: note = Table B: HLA-DRB1*04:05L
  source 1..14: note = Severe acute respiratory syndrome coronavirus 2
TQTTETAHSCNVNR

SEQ ID NO: 17351 - protein, 14 aa, Severe acute respiratory syndrome-related coronavirus
  REGION 1..14: note = Table B: HLA-DRB1*04:05L HLA-DRB1*08:04L HLA-DPA1*01:03-B1*03:01L HLA-DPA1*03:01-B1*04:02L HLA-DPA1*01:03-B1*04:02L HLA-DPA1*02:01-B1*13:01L HLA-DPA1*01:02-B1*04:01L HLA-DRB1*16:01L
  source 1..14: note = Severe acute respiratory syndrome coronavirus 2
TTETAHSCNVNRFN

SEQ ID NO: 17352 - protein, 13 aa, Severe acute respiratory syndrome-related coronavirus
  REGION 1..13: note = Table B: HLA-DRB1*04:05L HLA-DPA1*01:03-B1*03:01L HLA-DRB1*12:01L HLA-DPA1*02:01-B1*13:01L
  source 1..13: note = Severe acute respiratory syndrome coronavirus 2
TRAKVGILCIMSD

SEQ ID NO: 17353 - protein, 13 aa, Severe acute respiratory syndrome-related coronavirus
  REGION 1..13: note = Table B: HLA-DRB1*04:05L HLA-DRB1*01:02L HLA-DRB1*12:01L HLA-DPA1*02:01-B1*13:01L
  source 1..13: note = Severe acute respiratory syndrome coronavirus 2
RAKVGILCIMSDR

SEQ ID NO: 17354 - protein, 13 aa, Severe acute respiratory syndrome-related coronavirus
  REGION 1..13: note = Table B: HLA-DRB1*04:05L HLA-DQA1*01-B1*05L
  source 1..13: note = Severe acute respiratory syndrome coronavirus 2
KVGILCIMSDRDL

SEQ ID NO: 17355 - protein, 14 aa, Severe acute respiratory syndrome-related coronavirus
  REGION 1..14: note = Table B: HLA-DRB1*04:05L HLA-DRB1*11:03L HLA-DRB1*08:01L HLA-DRB1*11:01L HLA-DRB1*13:01L
  source 1..14: note = Severe acute respiratory syndrome coronavirus 2
PTHLSVDTKFKTEG

SEQ ID NO: 17356 - protein, 13 aa, Severe acute respiratory syndrome-related coronavirus
  REGION 1..13: note = Table B: HLA-DRB1*04:05L HLA-DQA1*01:02-B1*06:02L HLA-DRB1*14:01L HLA-DPA1*03:01-B1*105:01L
  source 1..13: note = Severe acute respiratory syndrome coronavirus 2
YRRLISMMGFKMN

SEQ ID NO: 17357 - protein, 13 aa, Severe acute respiratory syndrome-related coronavirus
  REGION 1..13: note = Table B: HLA-DRB1*04:05L HLA-DRB3*01:01L
  source 1..13: note = Severe acute respiratory syndrome coronavirus 2
PNMFITREEAIRH

SEQ ID NO: 17358 - protein, 13 aa, Severe acute respiratory syndrome-related coronavirus
  REGION 1..13: note = Table B: HLA-DRB1*04:05L HLA-DQA1*01:02-B1*06:02L HLA-DRB4*03:01NL HLA-DPA1*01:03-B1*03:01L HLA-DQA1*01:01-B1*05:01L HLA-DRB1*12:01L HLA-DQA1*05:05-B1*03:01L HLA-DRB1*16:01L
  source 1..13: note = Severe acute respiratory syndrome coronavirus 2
ATREAVGTNLPLQ

SEQ ID NO: 17359 - protein, 14 aa, Severe acute respiratory syndrome-related coronavirus
  REGION 1..14: note = Table B: HLA-DRB1*04:05L HLA-DRB1*11:04L HLA-DRB1*08:01L HLA-DRB3*01:01L HLA-DQA1*03:01-B1*03:02L
  source 1..14: note = Severe acute respiratory syndrome coronavirus 2
AHGFELTSMKYFVK

SEQ ID NO: 17360 - protein, 15 aa, Severe acute respiratory syndrome-related coronavirus
  REGION 1..15: note = Table B: HLA-DRB1*04:05L HLA-DRB1*12:01L
  source 1..15: note = Severe acute respiratory syndrome coronavirus 2
IGPERTCCLCDRRAT

SEQ ID NO: 17361 - protein, 15 aa, Severe acute respiratory syndrome-related coronavirus
  REGION 1..15: note = Table B: HLA-DRB1*04:05L HLA-DPA1*03:01-B1*105:01L HLA-DRB1*16:01L HLA-DRB1*15:03L
  source 1..15: note = Severe acute respiratory syndrome coronavirus 2
DRRATCFSTASDTYA

SEQ ID NO: 17362 - protein, 13 aa, Severe acute respiratory syndrome-related coronavirus
  REGION 1..13: note = Table B: HLA-DRB1*04:05L HLA-DRB1*01:02L HLA-DRB1*08:04L HLA-DRB1*11:04L HLA-DRB1*11:01L HLA-DPA1*03:01-B1*105:01L HLA-DQA1*05:05-B1*03:01L HLA-DPA1*01:02-B1*04:01L HLA-DRB1*16:01L
  source 1..13: note = Severe acute respiratory syndrome coronavirus 2
NHDLYCQVHGNAH

SEQ ID NO: 17363 - protein, 14 aa, Severe acute respiratory syndrome-related coronavirus
  REGION 1..14: note = Table B: HLA-DRB1*04:05L HLA-DRB1*01:02L HLA-DPA1*02:01-B1*13:01L HLA-DPA1*03:01-B1*105:01L HLA-DQA1*05:05-B1*03:01L HLA-DRB1*15:03L
  source 1..14: note = Severe acute respiratory syndrome coronavirus 2
MVVKAALLADKFPV

SEQ ID NO: 17364 - protein, 14 aa, Severe acute respiratory syndrome-related coronavirus
  REGION 1..14: note = Table B: HLA-DRB1*04:05L
  source 1..14: note = Severe acute respiratory syndrome coronavirus 2
VVKAALLADKFPVL

SEQ ID NO: 17365 - protein, 11 aa, Severe acute respiratory syndrome-related coronavirus
  REGION 1..11: note = Table B: HLA-DRB1*04:05L HLA-DRB4*03:01NL HLA-DRB1*08:01L HLA-DQA1*01-B1*05L HLA-DRB1*12:01L HLA-DRB1*14:54L HLA-DPA1*01:02-B1*04:01L HLA-DRB1*04:08L
  source 1..11: note = Severe acute respiratory syndrome coronavirus 2
FPVLHDIGNPK

SEQ ID NO: 17366 - protein, 11 aa, Severe acute respiratory syndrome-related coronavirus
  REGION 1..11: note = Table B: HLA-DRB1*04:05L
  source 1..11: note = Severe acute respiratory syndrome coronavirus 2
PVLHDIGNPKA

SEQ ID NO: 17367 - protein, 15 aa, Severe acute respiratory syndrome-related coronavirus
  REGION 1..15: note = Table B: HLA-DRB1*04:05L HLA-DRB1*12:01L HLA-DRB1*16:01L
  source 1..15: note = Severe acute respiratory syndrome coronavirus 2
PKAIKCVPQADVEWK

SEQ ID NO: 17368 - protein, 11 aa, Severe acute respiratory syndrome-related coronavirus
  REGION 1..11: note = Table B: HLA-DRB1*04:05L
  source 1..11: note = Severe acute respiratory syndrome coronavirus 2
AYKIEELFYSY

SEQ ID NO: 17369 - protein, 10 aa, Severe acute respiratory syndrome-related coronavirus
  REGION 1..10: note = Table B: HLA-DRB1*04:05L HLA-DPA1*02:01-B1*13:01M HLA-DQA1*01:03-B1*06:01L
  source 1..10: note = Severe acute respiratory syndrome coronavirus 2
KFTDGVCLFW

SEQ ID NO: 17370 - protein, 13 aa, Severe acute respiratory syndrome-related coronavirus
  REGION 1..13: note = Table B: HLA-DRB1*04:05L HLA-DRB1*14:01L HLA-DRB1*16:01L HLA-DRB1*04:08L HLA-DRB1*15:03L
  source 1..13: note = Severe acute respiratory syndrome coronavirus 2
SIVCRFDTRVLSN

SEQ ID NO: 17371 - protein, 12 aa, Severe acute respiratory syndrome-related coronavirus
  REGION 1..12: note = Table B: HLA-DRB1*04:05L HLA-DQA1*01:02-B1*06:02L HLA-DRB1*01:02L HLA-DRB1*12:01L HLA-DPA1*02:01-B1*13:01L HLA-DQA1*03:01-B1*03:02L HLA-DRB1*16:01L HLA-DQA1*02:01-B1*03:03L
  source 1..12: note = Severe acute respiratory syndrome coronavirus 2
VNKHAFHTPAFD

SEQ ID NO: 17372 - protein, 12 aa, Severe acute respiratory syndrome-related coronavirus
  REGION 1..12: note = Table B: HLA-DRB1*04:05L HLA-DRB1*12:01L HLA-DPA1*02:01-B1*13:01L
  source 1..12: note = Severe acute respiratory syndrome coronavirus 2
NKHAFHTPAFDK

SEQ ID NO: 17373 - protein, 14 aa, Severe acute respiratory syndrome-related coronavirus
  REGION 1..14: note = Table B: HLA-DRB1*04:05L HLA-DRB1*01:02L HLA-DRB1*12:01L HLA-DRB1*04:08L
  source 1..14: note = Severe acute respiratory syndrome coronavirus 2
AFHTPAFDKSAFVN

SEQ ID NO: 17374 - protein, 13 aa, Severe acute respiratory syndrome-related coronavirus
  REGION 1..13: note = Table B: HLA-DRB1*04:05L HLA-DRB1*14:02L HLA-DQA1*05:05-B1*03:19L HLA-DPA1*02:01-B1*13:01L HLA-DQA1*05:05-B1*03:01L HLA-DRB1*10:01L
  source 1..13: note = Severe acute respiratory syndrome coronavirus 2
DIDYVPLKSATCI

SEQ ID NO: 17375 - protein, 14 aa, Severe acute respiratory syndrome-related coronavirus
  REGION 1..14: note = Table B: HLA-DRB1*04:05L HLA-DRB1*01:02L HLA-DRB1*08:04L HLA-DPA1*01:03-B1*03:01L HLA-DRB1*08:01L HLA-DQA1*05:01-B1*02:01L HLA-DPA1*01:03-B1*04:02L HLA-DRB1*12:01L HLA-DQA1*05:05-B1*03:01L HLA-DRB1*04:08L
  source 1..14: note = Severe acute respiratory syndrome coronavirus 2
SAGFSLWVYKQFDT

SEQ ID NO: 17376 - protein, 13 aa, Severe acute respiratory syndrome-related coronavirus
  REGION 1..13: note = Table B: HLA-DRB1*04:05L HLA-DRB3*02:01L HLA-DPA1*01:03-B1*03:01L HLA-DQA1*05:01-B1*02:01L
  source 1..13: note = Severe acute respiratory syndrome coronavirus 2
ENVAFNVVNKGHF

SEQ ID NO: 17377 - protein, 14 aa, Severe acute respiratory syndrome-related coronavirus
  REGION 1..14: note = Table B: HLA-DRB1*04:05L HLA-DRB1*12:01L HLA-DRB1*15:03L
  source 1..14: note = Severe acute respiratory syndrome coronavirus 2
KGHFDGQQGEVPVS

SEQ ID NO: 17378 - protein, 13 aa, Severe acute respiratory syndrome-related coronavirus
  REGION 1..13: note = Table B: HLA-DRB1*04:05L HLA-DPA1*03:01-B1*04:02L HLA-DQA1*01:01-B1*05:01L HLA-DRB1*08:01L HLA-DQA1*05:05-B1*03:19L HLA-DPA1*02:01-B1*13:01L HLA-DQA1*05:05-B1*03:01L HLA-DRB1*15:03L
  source 1..13: note = Severe acute respiratory syndrome coronavirus 2
INNTVYTKVDGVD

SEQ ID NO: 17379 - protein, 14 aa, Severe acute respiratory syndrome-related coronavirus
  REGION 1..14: note = Table B: HLA-DRB1*04:05L HLA-DRB1*01:02L HLA-DRB1*12:01L HLA-DPA1*02:01-B1*13:01L HLA-DRB1*04:08L
  source 1..14: note = Severe acute respiratory syndrome coronavirus 2
GVDVELFENKTTLP

SEQ ID NO: 17380 - protein, 14 aa, Severe acute respiratory syndrome-related coronavirus
  REGION 1..14: note = Table B: HLA-DRB1*04:05L
  source 1..14: note = Severe acute respiratory syndrome coronavirus 2
NVAFELWAKRNIKP

SEQ ID NO: 17381 - protein, 15 aa, Severe acute respiratory syndrome-related coronavirus
  REGION 1..15: note = Table B: HLA-DRB1*04:05L
  source 1..15: note = Severe acute respiratory syndrome coronavirus 2
VAFELWAKRNIKPVP

SEQ ID NO: 17382 - protein, 12 aa, Severe acute respiratory syndrome-related coronavirus
  REGION 1..12: note = Table B: HLA-DRB1*04:05L HLA-DRB1*01:02L HLA-DPA1*02:01-B1*13:01L HLA-DRB1*04:08L
  source 1..12: note = Severe acute respiratory syndrome coronavirus 2
AKRNIKPVPEVK

SEQ ID NO: 17383 - protein, 15 aa, Severe acute respiratory syndrome-related coronavirus
  REGION 1..15: note = Table B: HLA-DRB1*04:05L HLA-DQA1*01-B1*05L HLA-DPA1*02:01-B1*13:01L
  source 1..15: note = Severe acute respiratory syndrome coronavirus 2
IAANTVIWDYKRDAP

SEQ ID NO: 17384 - protein, 12 aa, Severe acute respiratory syndrome-related coronavirus
  REGION 1..12: note = Table B: HLA-DRB1*04:05L
  source 1..12: note = Severe acute respiratory syndrome coronavirus 2
WDYKRDAPAHIS

SEQ ID NO: 17385 - protein, 14 aa, Severe acute respiratory syndrome-related coronavirus
  REGION 1..14: note = Table B: HLA-DRB1*04:05L HLA-DQA1*01:02-B1*06:02L HLA-DRB1*01:02L HLA-DPA1*01:03-B1*03:01L HLA-DRB1*12:01L HLA-DPA1*02:01-B1*13:01L HLA-DQA1*03:01-B1*03:02L HLA-DQA1*02:01-B1*03:03L
  source 1..14: note = Severe acute respiratory syndrome coronavirus 2
IAKKPTETICAPLT

SEQ ID NO: 17386 - protein, 13 aa, Severe acute respiratory syndrome-related coronavirus
  REGION 1..13: note = Table B: HLA-DRB1*04:05L HLA-DQA1*01:02-B1*06:02L HLA-DRB1*04:10L HLA-DRB1*16:01L HLA-DRB1*04:08L HLA-DQA1*02:01-B1*03:03L HLA-DRB1*15:03L
  source 1..13: note = Severe acute respiratory syndrome coronavirus 2
VDGQVDLFRNARN

SEQ ID NO: 17387 - protein, 12 aa, Severe acute respiratory syndrome-related coronavirus
  REGION 1..12: note = Table B: HLA-DRB1*04:05L HLA-DRB1*12:01L HLA-DQA1*03:01-B1*03:02L HLA-DQA1*02:01-B1*03:03L
  source 1..12: note = Severe acute respiratory syndrome coronavirus 2
RNARNGVLITEG

SEQ ID NO: 17388 - protein, 12 aa, Severe acute respiratory syndrome-related coronavirus
  REGION 1..12: note = Table B: HLA-DRB1*04:05L HLA-DQA1*01:02-B1*06:02L HLA-DRB1*01:02L HLA-DQA1*05:05-B1*03:19L HLA-DRB1*12:01L HLA-DQA1*05:05-B1*03:01L HLA-DQA1*01:03-B1*06:01L
  source 1..12: note = Severe acute respiratory syndrome coronavirus 2
VKGLQPSVGPKQ

SEQ ID NO: 17389 - protein, 11 aa, Severe acute respiratory syndrome-related coronavirus
  REGION 1..11: note = Table B: HLA-DRB1*04:05L HLA-DPA1*01:03-B1*03:01L HLA-DPA1*03:01-B1*04:02L HLA-DQA1*01-B1*05L HLA-DQA1*05:05-B1*03:19L HLA-DPA1*01:03-B1*04:02L HLA-DRB1*04:08L
  source 1..11: note = Severe acute respiratory syndrome coronavirus 2
VTLIGEAVKTQ

SEQ ID NO: 17390 - protein, 13 aa, Severe acute respiratory syndrome-related coronavirus
  REGION 1..13: note = Table B: HLA-DRB1*04:05L HLA-DRB1*01:02L
  source 1..13: note = Severe acute respiratory syndrome coronavirus 2
IGEAVKTQFNYYK

SEQ ID NO: 17391 - protein, 11 aa, Severe acute respiratory syndrome-related coronavirus
  REGION 1..11: note = Table B: HLA-DRB1*04:05L HLA-DRB1*01:02L HLA-DRB1*12:01L
  source 1..11: note = Severe acute respiratory syndrome coronavirus 2
YYKKVDGVVQQ

SEQ ID NO: 17392 - protein, 11 aa, Severe acute respiratory syndrome-related coronavirus
  REGION 1..11: note = Table B: HLA-DRB1*04:05L HLA-DRB1*08:01L
  source 1..11: note = Severe acute respiratory syndrome coronavirus 2
TYFTQSRNLQE

SEQ ID NO: 17393 - protein, 11 aa, Severe acute respiratory syndrome-related coronavirus
  REGION 1..11: note = Table B: HLA-DRB1*04:05L
  source 1..11: note = Severe acute respiratory syndrome coronavirus 2
YFTQSRNLQEF

SEQ ID NO: 17394 - protein, 12 aa, Severe acute respiratory syndrome-related coronavirus
  REGION 1..12: note = Table B: HLA-DRB1*04:05L HLA-DRB1*01:02L HLA-DRB1*08:01L HLA-DRB1*16:01L HLA-DRB1*04:08L
  source 1..12: note = Severe acute respiratory syndrome coronavirus 2
SRNLQEFKPRSQ

SEQ ID NO: 17395 - protein, 13 aa, Severe acute respiratory syndrome-related coronavirus
  REGION 1..13: note = Table B: HLA-DRB1*04:05L HLA-DRB1*08:04L
  source 1..13: note = Severe acute respiratory syndrome coronavirus 2
RYKLEGYAFEHIV

SEQ ID NO: 17396 - protein, 13 aa, Severe acute respiratory syndrome-related coronavirus
  REGION 1..13: note = Table B: HLA-DRB1*04:05L
  source 1..13: note = Severe acute respiratory syndrome coronavirus 2
LGGLHLLIGLAKR

SEQ ID NO: 17397 - protein, 14 aa, Severe acute respiratory syndrome-related coronavirus
  REGION 1..14: note = Table B: HLA-DRB1*04:05L
  source 1..14: note = Severe acute respiratory syndrome coronavirus 2
GGLHLLIGLAKRFK

SEQ ID NO: 17398 - protein, 13 aa, Severe acute respiratory syndrome-related coronavirus
  REGION 1..13: note = Table B: HLA-DRB1*04:05L HLA-DQA1*01-B1*05L
  source 1..13: note = Severe acute respiratory syndrome coronavirus 2
LAKRFKESPFELE

SEQ ID NO: 17399 - protein, 14 aa, Severe acute respiratory syndrome-related coronavirus
  REGION 1..14: note = Table B: HLA-DRB1*04:05L HLA-DPA1*02:01-B1*13:01L HLA-DPA1*03:01-B1*105:01L HLA-DRB1*16:01L HLA-DRB1*15:03L
  source 1..14: note = Severe acute respiratory syndrome coronavirus 2
DSTVKNYFITDAQT

SEQ ID NO: 17400 - protein, 14 aa, Severe acute respiratory syndrome-related coronavirus
  REGION 1..14: note = Table B: HLA-DRB1*04:05L
  source 1..14: note = Severe acute respiratory syndrome coronavirus 2
VIDLLLDDFVEIIK

SEQ ID NO: 17401 - protein, 12 aa, Severe acute respiratory syndrome-related coronavirus
  REGION 1..12: note = Table B: HLA-DRB1*04:05L HLA-DRB1*01:02L HLA-DRB1*04:10L HLA-DPA1*03:01-B1*105:01L HLA-DRB1*14:54L
  source 1..12: note = Severe acute respiratory syndrome coronavirus 2
SQDLSVVSKVVK

SEQ ID NO: 17402 - protein, 14 aa, Severe acute respiratory syndrome-related coronavirus
  REGION 1..14: note = Table B: HLA-DRB1*04:05L HLA-DRB1*01:02L HLA-DPA1*03:01-B1*04:02L
  source 1..14: note = Severe acute respiratory syndrome coronavirus 2
DLSVVSKVVKVTID

SEQ ID NO: 17403 - protein, 10 aa, Severe acute respiratory syndrome-related coronavirus
  REGION 1..10: note = Table B: HLA-DRB1*04:05L HLA-DQA1*01:02-B1*06:02L HLA-DPA1*02:01-B1*13:01M HLA-DPA1*03:01-B1*105:01L HLA-DQA1*01:03-B1*06:01L HLA-DRB1*15:03L
  source 1..10: note = Severe acute respiratory syndrome coronavirus 2
DYTEISFMLW

SEQ ID NO: 17404 - protein, 12 aa, Severe acute respiratory syndrome-related coronavirus
  REGION 1..12: note = Table B: HLA-DRB1*04:05L HLA-DQA1*01:02-B1*06:02L HLA-DRB1*08:04L HLA-DRB1*08:01L
  source 1..12: note = Severe acute respiratory syndrome coronavirus 2
ETFYPKLQSSQA

SEQ ID NO: 17405 - protein, 13 aa, Severe acute respiratory syndrome-related coronavirus
  REGION 1..13: note = Table B: HLA-DRB1*04:05L HLA-DRB4*03:01NL HLA-DRB1*10:01L
  source 1..13: note = Severe acute respiratory syndrome coronavirus 2
AWQPGVAMPNLYK

SEQ ID NO: 17406 - protein, 15 aa, Severe acute respiratory syndrome-related coronavirus
  REGION 1..15: note = Table B: HLA-DRB1*04:05L HLA-DRB1*16:01L HLA-DRB1*15:03L
  source 1..15: note = Severe acute respiratory syndrome coronavirus 2
MQRMLLEKCDLQNYG

SEQ ID NO: 17407 - protein, 16 aa, Severe acute respiratory syndrome-related coronavirus
  REGION 1..16: note = Table B: HLA-DRB1*04:05L HLA-DRB1*12:01L HLA-DPA1*02:01-B1*13:01L HLA-DRB1*16:01L
  source 1..16: note = Severe acute respiratory syndrome coronavirus 2
QRMLLEKCDLQNYGDS

SEQ ID NO: 17408 - protein, 12 aa, Severe acute respiratory syndrome-related coronavirus
  REGION 1..12: note = Table B: HLA-DRB1*04:05L HLA-DRB1*04:08L
  source 1..12: note = Severe acute respiratory syndrome coronavirus 2
MRVIHFGAGSDK

SEQ ID NO: 17409 - protein, 12 aa, Severe acute respiratory syndrome-related coronavirus
  REGION 1..12: note = Table B: HLA-DRB1*04:05L HLA-DRB1*01:02L HLA-DRB1*04:08L
  source 1..12: note = Severe acute respiratory syndrome coronavirus 2
RVIHFGAGSDKG

SEQ ID NO: 17410 - protein, 13 aa, Severe acute respiratory syndrome-related coronavirus
  REGION 1..13: note = Table B: HLA-DRB1*04:05L HLA-DRB1*01:02L HLA-DQA1*01:01-B1*05:01L HLA-DRB1*04:08L
  source 1..13: note = Severe acute respiratory syndrome coronavirus 2
SDKGVAPGTAVLR

SEQ ID NO: 17411 - protein, 12 aa, Severe acute respiratory syndrome-related coronavirus
  REGION 1..12: note = Table B: HLA-DRB1*04:05L
  source 1..12: note = Severe acute respiratory syndrome coronavirus 2
LLVDSDLNDFVS

SEQ ID NO: 17412 - protein, 11 aa, Severe acute respiratory syndrome-related coronavirus
  REGION 1..11: note = Table B: HLA-DRB1*04:05L HLA-DRB4*03:01NL HLA-DRB1*16:01L HLA-DQA1*02:01-B1*03:03L
  source 1..11: note = Severe acute respiratory syndrome coronavirus 2
ISDMYDPKTKN

SEQ ID NO: 17413 - protein, 14 aa, Severe acute respiratory syndrome-related coronavirus
  REGION 1..14: note = Table B: HLA-DRB1*04:05L HLA-DRB1*11:04L HLA-DRB1*08:01L HLA-DRB1*11:01L HLA-DPA1*01:03-B1*04:02L HLA-DRB1*15:03L
  source 1..14: note = Severe acute respiratory syndrome coronavirus 2
GFIQQKLALGGSVA

SEQ ID NO: 17414 - protein, 14 aa, Severe acute respiratory syndrome-related coronavirus
  REGION 1..14: note = Table B: HLA-DRB1*04:05L HLA-DPA1*01:03-B1*03:01L HLA-DPA1*01:03-B1*04:02L HLA-DPA1*02:01-B1*13:01L
  source 1..14: note = Severe acute respiratory syndrome coronavirus 2
LALGGSVAIKITEH

SEQ ID NO: 17415 - protein, 13 aa, Severe acute respiratory syndrome-related coronavirus
  REGION 1..13: note = Table B: HLA-DRB1*04:05L HLA-DRB1*01:02L HLA-DRB1*12:01L HLA-DPA1*02:01-B1*13:01L HLA-DQA1*03:01-B1*03:02L HLA-DRB1*16:01L
  source 1..13: note = Severe acute respiratory syndrome coronavirus 2
GKPREQIDGYVMH

SEQ ID NO: 17416 - protein, 15 aa, Severe acute respiratory syndrome-related coronavirus
  REGION 1..15: note = Table B: HLA-DRB1*04:05L HLA-DRB1*04:08L
  source 1..15: note = Severe acute respiratory syndrome coronavirus 2
KPREQIDGYVMHANY

SEQ ID NO: 17417 - protein, 12 aa, Severe acute respiratory syndrome-related coronavirus
  REGION 1..12: note = Table B: HLA-DRB1*04:05L HLA-DRB1*01:02L
  source 1..12: note = Severe acute respiratory syndrome coronavirus 2
LTTRTQLPPAYT

SEQ ID NO: 17418 - protein, 12 aa, Severe acute respiratory syndrome-related coronavirus
  REGION 1..12: note = Table B: HLA-DRB1*04:05L HLA-DRB1*01:02L HLA-DRB3*02:01L HLA-DRB1*14:17L HLA-DRB1*04:08L
  source 1..12: note = Severe acute respiratory syndrome coronavirus 2
DNPVLPFNDGVY

SEQ ID NO: 17419 - protein, 12 aa, Severe acute respiratory syndrome-related coronavirus
  REGION 1..12: note = Table B: HLA-DRB1*04:05L HLA-DRB1*15:03L
  source 1..12: note = Severe acute respiratory syndrome coronavirus 2
YFASTEKSNIIR

SEQ ID NO: 17420 - protein, 12 aa, Severe acute respiratory syndrome-related coronavirus
  REGION 1..12: note = Table B: HLA-DRB1*04:05L HLA-DQA1*05:01-B1*02:01L HLA-DRB1*15:03L
  source 1..12: note = Severe acute respiratory syndrome coronavirus 2
FASTEKSNIIRG

SEQ ID NO: 17421 - protein, 10 aa, Severe acute respiratory syndrome-related coronavirus
  REGION 1..10: note = Table B: HLA-DRB1*04:05L HLA-DPA1*02:01-B1*13:01L HLA-DQA1*01:03-B1*06:01L
  source 1..10: note = Severe acute respiratory syndrome coronavirus 2
NFKNLREFVF

SEQ ID NO: 17422 - protein, 14 aa, Severe acute respiratory syndrome-related coronavirus
  REGION 1..14: note = Table B: HLA-DRB1*04:05L HLA-DRB1*01:02L HLA-DRB1*12:01L
  source 1..14: note = Severe acute respiratory syndrome coronavirus 2
VFKNIDGYFKIYSK

SEQ ID NO: 17423 - protein, 15 aa, Severe acute respiratory syndrome-related coronavirus
  REGION 1..15: note = Table B: HLA-DRB1*04:05L
  source 1..15: note = Severe acute respiratory syndrome coronavirus 2
PQGFSALEPLVDLPI

SEQ ID NO: 17424 - protein, 13 aa, Severe acute respiratory syndrome-related coronavirus
  REGION 1..13: note = Table B: HLA-DRB1*04:05L HLA-DPA1*02:01-B1*13:01L
  source 1..13: note = Severe acute respiratory syndrome coronavirus 2
LHRSYLTPGDSSS

SEQ ID NO: 17425 - protein, 11 aa, Severe acute respiratory syndrome-related coronavirus
  REGION 1..11: note = Table B: HLA-DRB1*04:05L HLA-DRB1*01:02L HLA-DRB4*03:01NL
  source 1..11: note = Severe acute respiratory syndrome coronavirus 2
AYYVGYLQPRT

SEQ ID NO: 17426 - protein, 11 aa, Severe acute respiratory syndrome-related coronavirus
  REGION 1..11: note = Table B: HLA-DRB1*04:05L HLA-DRB1*01:02L HLA-DRB1*04:08L
  source 1..11: note = Severe acute respiratory syndrome coronavirus 2
KSFTVEKGIYQ

SEQ ID NO: 17427 - protein, 12 aa, Severe acute respiratory syndrome-related coronavirus
  REGION 1..12: note = Table B: HLA-DRB1*04:05L HLA-DRB1*01:02L HLA-DRB1*08:04L HLA-DPA1*01:03-B1*03:01L HLA-DRB1*14:01L HLA-DRB1*08:01L HLA-DQA1*05:05-B1*03:19L HLA-DPA1*02:01-B1*13:01L HLA-DPA1*01:03-B1*02:01L HLA-DQA1*05:05-B1*03:01L
  REGION 1..12: note = CONT. FROM ABOVE: HLA-DRB1*15:03L
  source 1..12: note = Severe acute respiratory syndrome coronavirus 2
YQTSNFRVQPTE

SEQ ID NO: 17428 - protein, 11 aa, Severe acute respiratory syndrome-related coronavirus
  REGION 1..11: note = Table B: HLA-DRB1*04:05L HLA-DQA1*01:02-B1*06:02L HLA-DRB1*01:02M HLA-DRB1*08:04L HLA-DRB1*08:77L HLA-DPA1*01:03-B1*03:01L HLA-DRB1*03:01L HLA-DRB1*11:03L HLA-DQA1*01:01-B1*05:01L HLA-DQA1*01-B1*05L
  REGION 1..11: note = CONT. FROM ABOVE: HLA-DQA1*05:05-B1*03:19L HLA-DQA1*05:01-B1*02: 01L HLA-DRB1*04:10L HLA-DPA1*02:01-B1*13:01L HLA-DPA1*03:01-B1*1 05:01L HLA-DRB1*14:54L HLA-DPA1*01:02-B1*04:01L HLA-DRB1*07:01L HLA-DRB1*10:01L HLA-DRB1*04:08M HLA-DRB1*15:03L
  source 1..11: note = Severe acute respiratory syndrome coronavirus 2
FRVQPTESIVR

SEQ ID NO: 17429 - protein, 15 aa, Severe acute respiratory syndrome-related coronavirus
  REGION 1..15: note = Table B: HLA-DRB1*04:05L HLA-DRB1*12:01L HLA-DPA1*02:01-B1*13:01L HLA-DRB1*16:01L HLA-DRB1*04:08L
  source 1..15: note = Severe acute respiratory syndrome coronavirus 2
ITNLCPFGEVFNATR

SEQ ID NO: 17430 - protein, 11 aa, Severe acute respiratory syndrome-related coronavirus
  REGION 1..11: note = Table B: HLA-DRB1*04:05L HLA-DQA1*01:02-B1*06:02L HLA-DPA1*02:01-B1*13:01L
  source 1..11: note = Severe acute respiratory syndrome coronavirus 2
PFGEVFNATRF

SEQ ID NO: 17431 - protein, 13 aa, Severe acute respiratory syndrome-related coronavirus
  REGION 1..13: note = Table B: HLA-DRB1*04:05L HLA-DRB1*01:02L HLA-DPA1*01:03-B1*03:01L HLA-DRB1*12:01L HLA-DPA1*02:01-B1*13:01L
  source 1..13: note = Severe acute respiratory syndrome coronavirus 2
WNRKRISNCVADY

SEQ ID NO: 17432 - protein, 12 aa, Severe acute respiratory syndrome-related coronavirus
  REGION 1..12: note = Table B: HLA-DRB1*04:05L HLA-DQA1*01-B1*05L HLA-DQA1*05:01-B1*02:01L HLA-DPA1*03:01-B1*105:01L HLA-DRB1*16:01L HLA-DRB1*04:08L
  source 1..12: note = Severe acute respiratory syndrome coronavirus 2
ADYSVLYNSASF

SEQ ID NO: 17433 - protein, 13 aa, Severe acute respiratory syndrome-related coronavirus
  REGION 1..13: note = Table B: HLA-DRB1*04:05L HLA-DRB1*01:02L HLA-DRB1*08:01L HLA-DRB1*04:08L
  source 1..13: note = Severe acute respiratory syndrome coronavirus 2
DSKVGGNYNYLYR

SEQ ID NO: 17434 - protein, 14 aa, Severe acute respiratory syndrome-related coronavirus
  REGION 1..14: note = Table B: HLA-DRB1*04:05L HLA-DQA1*01:02-B1*06:02L
  source 1..14: note = Severe acute respiratory syndrome coronavirus 2
NYLYRLFRKSNLKP

SEQ ID NO: 17435 - protein, 12 aa, Severe acute respiratory syndrome-related coronavirus
  REGION 1..12: note = Table B: HLA-DRB1*04:05L HLA-DRB1*01:02L HLA-DRB4*03:01NL HLA-DRB4*02:01NL HLA-DQA1*05:01-B1*02:01L HLA-DPA1*01:03-B1*04:02L HLA-DRB1*14:17L HLA-DRB1*16:01L HLA-DRB1*04:08L
  source 1..12: note = Severe acute respiratory syndrome coronavirus 2
LTGTGVLTESNK

SEQ ID NO: 17436 - protein, 13 aa, Severe acute respiratory syndrome-related coronavirus
  REGION 1..13: note = Table B: HLA-DRB1*04:05L HLA-DQA1*01:01-B1*05:01L HLA-DQA1*05:01-B1*02:01L
  source 1..13: note = Severe acute respiratory syndrome coronavirus 2
FGRDIADTTDAVR

SEQ ID NO: 17437 - protein, 12 aa, Severe acute respiratory syndrome-related coronavirus
  REGION 1..12: note = Table B: HLA-DRB1*04:05L HLA-DRB1*01:02L HLA-DRB1*08:77L HLA-DPA1*01:03-B1*03:01L HLA-DPA1*03:01-B1*04:02L HLA-DRB1*11:03L HLA-DQA1*01:01-B1*05:01L HLA-DQA1*01-B1*05L HLA-DQA1*05:01-B1*02:01L HLA-DQA1*05:05-B1*03:116L
  REGION 1..12: note = CONT. FROM ABOVE: HLA-DRB1*04:10L HLA-DRB1*09:01L HLA-DPA1*02:01 -B1*13:01L HLA-DPA1*01:03-B1*02:01L HLA-DPA1*01:03-B1*104:01L HL A-DPA1*01:02-B1*04:01L HLA-DRB1*07:01L HLA-DRB1*10:01L HLA-DRB1* 04:08L HLA-DRB1*15:03L
  source 1..12: note = Severe acute respiratory syndrome coronavirus 2
VYSTGSNVFQTR

SEQ ID NO: 17438 - protein, 12 aa, Severe acute respiratory syndrome-related coronavirus
  REGION 1..12: note = Table B: HLA-DRB1*04:05L HLA-DRB1*01:02L HLA-DPA1*01:03-B1*03:01L HLA-DQA1*05:01-B1*02:01L HLA-DRB1*04:08L
  source 1..12: note = Severe acute respiratory syndrome coronavirus 2
STGSNVFQTRAG

SEQ ID NO: 17439 - protein, 14 aa, Severe acute respiratory syndrome-related coronavirus
  REGION 1..14: note = Table B: HLA-DRB1*04:05L HLA-DRB1*01:02L HLA-DRB1*12:01L HLA-DPA1*02:01-B1*13:01L
  source 1..14: note = Severe acute respiratory syndrome coronavirus 2
PRRARSVASQSIIA

SEQ ID NO: 17440 - protein, 12 aa, Severe acute respiratory syndrome-related coronavirus
  REGION 1..12: note = Table B: HLA-DRB1*04:05L HLA-DRB1*01:02L HLA-DPA1*01:03-B1*03:01L HLA-DQA1*05:05-B1*03:19L HLA-DRB1*16:01L HLA-DRB1*15:03L
  source 1..12: note = Severe acute respiratory syndrome coronavirus 2
TEILPVSMTKTS

SEQ ID NO: 17441 - protein, 12 aa, Severe acute respiratory syndrome-related coronavirus
  REGION 1..12: note = Table B: HLA-DRB1*04:05L HLA-DQA1*01:02-B1*06:02L HLA-DPA1*01:03-B1*03:01L HLA-DQA1*05:05-B1*03:19L HLA-DRB1*12:01L HLA-DQA1*03:01-B1*03:02L HLA-DQA1*05:05-B1*03:01L HLA-DQA1*01:03-B1*06:01L
  REGION 1..12: note = CONT. FROM ABOVE: HLA-DQA1*02:01-B1*03:03L
  source 1..12: note = Severe acute respiratory syndrome coronavirus 2
LNRALTGIAVEQ

SEQ ID NO: 17442 - protein, 13 aa, Severe acute respiratory syndrome-related coronavirus
  REGION 1..13: note = Table B: HLA-DRB1*04:05L HLA-DRB1*08:04L HLA-DRB1*11:03L HLA-DRB1*11:01L HLA-DRB3*01:01L HLA-DRB1*04:08L HLA-DRB1*08:03L
  source 1..13: note = Severe acute respiratory syndrome coronavirus 2
TQEVFAQVKQIYK

SEQ ID NO: 17443 - protein, 12 aa, Severe acute respiratory syndrome-related coronavirus
  REGION 1..12: note = Table B: HLA-DRB1*04:05L HLA-DRB1*04:10L HLA-DRB1*12:01L
  source 1..12: note = Severe acute respiratory syndrome coronavirus 2
FNFSQILPDPSK

SEQ ID NO: 17444 - protein, 12 aa, Severe acute respiratory syndrome-related coronavirus
  REGION 1..12: note = Table B: HLA-DRB1*04:05L HLA-DRB1*11:04L HLA-DRB1*11:01L HLA-DRB3*01:01L
  source 1..12: note = Severe acute respiratory syndrome coronavirus 2
SFIEDLLFNKVT

SEQ ID NO: 17445 - protein, 13 aa, Severe acute respiratory syndrome-related coronavirus
  REGION 1..13: note = Table B: HLA-DRB1*04:05L HLA-DRB1*01:02L HLA-DRB1*08:01L HLA-DQA1*05:01-B1*02:01L HLA-DRB1*12:02L HLA-DRB1*14:17L HLA-DRB1*04:08L HLA-DQA1*02:01-B1*03:03L
  source 1..13: note = Severe acute respiratory syndrome coronavirus 2
EDLLFNKVTLADA

SEQ ID NO: 17446 - protein, 14 aa, Severe acute respiratory syndrome-related coronavirus
  REGION 1..14: note = Table B: HLA-DRB1*04:05L HLA-DRB1*07:01L
  source 1..14: note = Severe acute respiratory syndrome coronavirus 2
FNGIGVTQNVLYEN

SEQ ID NO: 17447 - protein, 14 aa, Severe acute respiratory syndrome-related coronavirus
  REGION 1..14: note = Table B: HLA-DRB1*04:05L HLA-DRB1*04:10L HLA-DRB1*07:01L
  source 1..14: note = Severe acute respiratory syndrome coronavirus 2
NGIGVTQNVLYENQ

SEQ ID NO: 17448 - protein, 11 aa, Severe acute respiratory syndrome-related coronavirus
  REGION 1..11: note = Table B: HLA-DRB1*04:05L HLA-DRB4*03:01NL HLA-DPA1*03:01-B1*04:02L HLA-DRB1*03:01L HLA-DRB1*14:01L HLA-DQA1*01-B1*05L HLA-DRB4*01:01L HLA-DQA1*05:05-B1*03:116L HLA-DPA1*01:03-B1*04:02L HLA-DRB1*12:01L
  REGION 1..11: note = CONT. FROM ABOVE: HLA-DPA1*01:03-B1*104:01L HLA-DPA1*01:02-B1*04 :01L HLA-DRB1*10:01L HLA-DRB1*16:01L HLA-DRB1*08:02L
  source 1..11: note = Severe acute respiratory syndrome coronavirus 2
YENQKLIANQF

SEQ ID NO: 17449 - protein, 12 aa, Severe acute respiratory syndrome-related coronavirus
  REGION 1..12: note = Table B: HLA-DRB1*04:05L HLA-DRB1*01:02L HLA-DRB1*04:08L HLA-DRB1*15:03L
  source 1..12: note = Severe acute respiratory syndrome coronavirus 2
QFNSAIGKIQDS

SEQ ID NO: 17450 - protein, 11 aa, Severe acute respiratory syndrome-related coronavirus
  REGION 1..11: note = Table B: HLA-DRB1*04:05L HLA-DRB4*03:01NL HLA-DRB1*04:10L
  source 1..11: note = Severe acute respiratory syndrome coronavirus 2
AIGKIQDSLSS

SEQ ID NO: 17451 - protein, 12 aa, Severe acute respiratory syndrome-related coronavirus
  REGION 1..12: note = Table B: HLA-DRB1*04:05L HLA-DRB1*01:02L HLA-DRB1*04:10L HLA-DRB1*12:01L HLA-DPA1*03:01-B1*105:01L
  source 1..12: note = Severe acute respiratory syndrome coronavirus 2
ALGKLQDVVNQN

SEQ ID NO: 17452 - protein, 12 aa, Severe acute respiratory syndrome-related coronavirus
  REGION 1..12: note = Table B: HLA-DRB1*04:05L HLA-DRB1*04:10L
  source 1..12: note = Severe acute respiratory syndrome coronavirus 2
LGKLQDVVNQNA

SEQ ID NO: 17453 - protein, 11 aa, Severe acute respiratory syndrome-related coronavirus
  REGION 1..11: note = Table B: HLA-DRB1*04:05L HLA-DRB1*11:03L HLA-DRB1*11:04L
  source 1..11: note = Severe acute respiratory syndrome coronavirus 2
VVNQNAQALNT

SEQ ID NO: 17454 - protein, 12 aa, Severe acute respiratory syndrome-related coronavirus
  REGION 1..12: note = Table B: HLA-DRB1*04:05L HLA-DRB1*01:02L HLA-DRB3*02:01L HLA-DPA1*01:03-B1*03:01L HLA-DPA1*03:01-B1*04:02L HLA-DRB1*14:01L HLA-DRB1*14:02L HLA-DQA1*05:05-B1*03:19L HLA-DPA1*02:01-B1*13:01L HLA-DPA1*01:03-B1*104:01L
  REGION 1..12: note = CONT. FROM ABOVE: HLA-DQA1*05:05-B1*03:01L HLA-DRB1*04:08L
  source 1..12: note = Severe acute respiratory syndrome coronavirus 2
FGAISSVLNDIL

SEQ ID NO: 17455 - protein, 12 aa, Severe acute respiratory syndrome-related coronavirus
  REGION 1..12: note = Table B: HLA-DRB1*04:05L HLA-DRB1*04:10L HLA-DRB1*14:17L HLA-DRB1*04:08L
  source 1..12: note = Severe acute respiratory syndrome coronavirus 2
SVLNDILSRLDK

SEQ ID NO: 17456 - protein, 14 aa, Severe acute respiratory syndrome-related coronavirus
  REGION 1..14: note = Table B: HLA-DRB1*04:05L HLA-DRB1*01:02L
  source 1..14: note = Severe acute respiratory syndrome coronavirus 2
DKVEAEVQIDRLIT

SEQ ID NO: 17457 - protein, 13 aa, Severe acute respiratory syndrome-related coronavirus
  REGION 1..13: note = Table B: HLA-DRB1*04:05L HLA-DRB1*08:04L HLA-DQA1*01:01-B1*05:01L HLA-DRB1*08:01L HLA-DRB1*04:10L HLA-DRB1*12:02L
  source 1..13: note = Severe acute respiratory syndrome coronavirus 2
VEAEVQIDRLITG

SEQ ID NO: 17458 - protein, 13 aa, Severe acute respiratory syndrome-related coronavirus
  REGION 1..13: note = Table B: HLA-DRB1*04:05L HLA-DRB1*08:04L HLA-DRB1*08:77L HLA-DPA1*01:03-B1*03:01L HLA-DRB1*03:01L HLA-DRB1*14:02L HLA-DRB1*04:08L
  source 1..13: note = Severe acute respiratory syndrome coronavirus 2
AEVQIDRLITGRL

SEQ ID NO: 17459 - protein, 12 aa, Severe acute respiratory syndrome-related coronavirus
  REGION 1..12: note = Table B: HLA-DRB1*04:05L HLA-DRB1*14:17L HLA-DRB1*16:01L HLA-DRB1*04:08L
  source 1..12: note = Severe acute respiratory syndrome coronavirus 2
GKGYHLMSFPQS

SEQ ID NO: 17460 - protein, 13 aa, Severe acute respiratory syndrome-related coronavirus
  REGION 1..13: note = Table B: HLA-DRB1*04:05L HLA-DRB1*01:02L HLA-DRB1*16:01L HLA-DRB1*04:08L
  source 1..13: note = Severe acute respiratory syndrome coronavirus 2
KGYHLMSFPQSAP

SEQ ID NO: 17461 - protein, 14 aa, Severe acute respiratory syndrome-related coronavirus
  REGION 1..14: note = Table B: HLA-DRB1*04:05L HLA-DQA1*01:02-B1*06:02L HLA-DPA1*01:03-B1*03:01L HLA-DRB1*12:01L HLA-DPA1*02:01-B1*13:01L HLA-DRB1*16:01L HLA-DQA1*01:03-B1*06:01L
  source 1..14: note = Severe acute respiratory syndrome coronavirus 2
VPAQEKNFTTAPAI

SEQ ID NO: 17462 - protein, 14 aa, Severe acute respiratory syndrome-related coronavirus
  REGION 1..14: note = Table B: HLA-DRB1*04:05L HLA-DRB1*12:01L
  source 1..14: note = Severe acute respiratory syndrome coronavirus 2
AQEKNFTTAPAICH

SEQ ID NO: 17463 - protein, 12 aa, Severe acute respiratory syndrome-related coronavirus
  REGION 1..12: note = Table B: HLA-DRB1*04:05L HLA-DRB1*04:10L
  source 1..12: note = Severe acute respiratory syndrome coronavirus 2
QIITTDNTFVSG

SEQ ID NO: 17464 - protein, 12 aa, Severe acute respiratory syndrome-related coronavirus
  REGION 1..12: note = Table B: HLA-DRB1*04:05L HLA-DQA1*01:02-B1*06:02L HLA-DRB1*08:01L HLA-DRB1*04:10L HLA-DRB1*16:01L HLA-DRB1*04:08L HLA-DRB1*15:03L
  source 1..12: note = Severe acute respiratory syndrome coronavirus 2
PELDSFKEELDK

SEQ ID NO: 17465 - protein, 14 aa, Severe acute respiratory syndrome-related coronavirus
  REGION 1..14: note = Table B: HLA-DRB1*04:05L HLA-DQA1*01:02-B1*06:02L HLA-DQA1*05:05-B1*03:01L
  source 1..14: note = Severe acute respiratory syndrome coronavirus 2
FKNHTSPDVDLGDI

SEQ ID NO: 17466 - protein, 14 aa, Severe acute respiratory syndrome-related coronavirus
  REGION 1..14: note = Table B: HLA-DRB1*04:05L HLA-DQA1*01:02-B1*06:02L HLA-DRB1*01:02L HLA-DRB1*08:01L HLA-DPA1*02:01-B1*13:01L HLA-DPA1*03:01-B1*105:01L
  source 1..14: note = Severe acute respiratory syndrome coronavirus 2
VNIQKEIDRLNEVA

SEQ ID NO: 17467 - protein, 14 aa, Severe acute respiratory syndrome-related coronavirus
  REGION 1..14: note = Table B: HLA-DRB1*04:05L HLA-DRB1*15:03L
  source 1..14: note = Severe acute respiratory syndrome coronavirus 2
NLNESLIDLQELGK

SEQ ID NO: 17468 - protein, 13 aa, Severe acute respiratory syndrome-related coronavirus
  REGION 1..13: note = Table B: HLA-DRB1*04:05L HLA-DRB1*11:04L HLA-DRB1*14:02L HLA-DRB1*11:01L HLA-DRB1*08:03L
  source 1..13: note = Severe acute respiratory syndrome coronavirus 2
LGKYEQYIKWPWY

SEQ ID NO: 17469 - protein, 13 aa, Severe acute respiratory syndrome-related coronavirus
  REGION 1..13: note = Table B: HLA-DRB1*04:05L HLA-DRB1*14:01L HLA-DRB1*08:01L HLA-DRB1*12:01L HLA-DRB1*04:08L HLA-DRB1*15:03L
  source 1..13: note = Severe acute respiratory syndrome coronavirus 2
SEPVLKGVKLHYT

SEQ ID NO: 17470 - protein, 13 aa, Severe acute respiratory syndrome-related coronavirus
  REGION 1..13: note = Table B: HLA-DRB1*04:05L HLA-DRB1*01:02L HLA-DRB4*03:01NL HLA-DRB1*14:01L HLA-DRB1*12:02L HLA-DRB1*14:54L HLA-DRB1*16:01L
  source 1..13: note = Severe acute respiratory syndrome coronavirus 2
TATIPIQASLPFG

SEQ ID NO: 17471 - protein, 10 aa, Severe acute respiratory syndrome-related coronavirus
  REGION 1..10: note = Table B: HLA-DRB1*04:05L HLA-DQA1*01:02-B1*06:02L HLA-DQA1*05:05-B1*03:19L HLA-DPA1*02:01-B1*13:01L HLA-DPA1*03:01-B1*105:01L HLA-DQA1*01:03-B1*06:01L HLA-DQA1*02:01-B1*03:03L HLA-DRB1*15:03L
  source 1..10: note = Severe acute respiratory syndrome coronavirus 2
PIQASLPFGW

SEQ ID NO: 17472 - protein, 12 aa, Severe acute respiratory syndrome-related coronavirus
  REGION 1..12: note = Table B: HLA-DRB1*04:05L HLA-DRB3*01:01L
  source 1..12: note = Severe acute respiratory syndrome coronavirus 2
SKIITLKKRWQL

SEQ ID NO: 17473 - protein, 13 aa, Severe acute respiratory syndrome-related coronavirus
  REGION 1..13: note = Table B: HLA-DRB1*04:05L HLA-DRB1*01:02L HLA-DRB1*12:01L HLA-DPA1*02:01-B1*13:01L
  source 1..13: note = Severe acute respiratory syndrome coronavirus 2
TLKKRWQLALSKG

SEQ ID NO: 17474 - protein, 12 aa, Severe acute respiratory syndrome-related coronavirus
  REGION 1..12: note = Table B: HLA-DRB1*04:05L HLA-DQA1*01-B1*05L HLA-DQA1*05:01-B1*02:01L
  source 1..12: note = Severe acute respiratory syndrome coronavirus 2
LVYFLQSINFVR

SEQ ID NO: 17475 - protein, 10 aa, Severe acute respiratory syndrome-related coronavirus
  REGION 1..10: note = Table B: HLA-DRB1*04:05L HLA-DPA1*02:01-B1*13:01L HLA-DQA1*01:03-B1*06:01L
  source 1..10: note = Severe acute respiratory syndrome coronavirus 2
NFVRIIMRLW

SEQ ID NO: 17476 - protein, 13 aa, Severe acute respiratory syndrome-related coronavirus
  REGION 1..13: note = Table B: HLA-DRB1*04:05L HLA-DRB4*03:01NL HLA-DRB1*04:10L HLA-DRB1*12:01L HLA-DRB1*14:54L HLA-DRB1*16:01L
  source 1..13: note = Severe acute respiratory syndrome coronavirus 2
TSSIVITSGDGTT

SEQ ID NO: 17477 - protein, 14 aa, Severe acute respiratory syndrome-related coronavirus
  REGION 1..14: note = Table B: HLA-DRB1*04:05L HLA-DRB1*01:02L HLA-DQA1*01:01-B1*05:01L HLA-DPA1*02:01-B1*13:01L HLA-DQA1*05:05-B1*03:01L
  source 1..14: note = Severe acute respiratory syndrome coronavirus 2
SPISEHDYQIGGYT

SEQ ID NO: 17478 - protein, 12 aa, Severe acute respiratory syndrome-related coronavirus
  REGION 1..12: note = Table B: HLA-DRB1*04:05L
  source 1..12: note = Severe acute respiratory syndrome coronavirus 2
FYVYSRVKNLNS

SEQ ID NO: 17479 - protein, 12 aa, Severe acute respiratory syndrome-related coronavirus
  REGION 1..12: note = Table B: HLA-DRB1*04:05L HLA-DQA1*01:02-B1*06:02L HLA-DRB1*01:02L HLA-DRB1*11:04L HLA-DRB1*08:01L HLA-DRB1*11:01L HLA-DRB1*12:01L
  source 1..12: note = Severe acute respiratory syndrome coronavirus 2
VYSRVKNLNSSR

SEQ ID NO: 17480 - protein, 12 aa, Severe acute respiratory syndrome-related coronavirus
  REGION 1..12: note = Table B: HLA-DRB1*04:05L HLA-DRB1*01:02L
  source 1..12: note = Severe acute respiratory syndrome coronavirus 2
SNGTITVEELKK

SEQ ID NO: 17481 - protein, 11 aa, Severe acute respiratory syndrome-related coronavirus
  REGION 1..11: note = Table B: HLA-DRB1*04:05L HLA-DRB1*01:02L HLA-DRB1*08:77L HLA-DRB3*02:01L HLA-DPA1*01:03-B1*03:01L HLA-DRB1*14:01L HLA-DRB1*14:02L HLA-DQA1*01-B1*05L HLA-DQA1*05:05-B1*03:19L HLA-DPA1*01:03-B1*04:01L HLA-DPA1*01:03-B1*04:02L
  REGION 1..11: note = CONT. FROM ABOVE: HLA-DPA1*02:01-B1*13:01L HLA-DPA1*01:03-B1*104 :01L HLA-DRB1*04:08L
  source 1..11: note = Severe acute respiratory syndrome coronavirus 2
GTITVEELKKL

SEQ ID NO: 17482 - protein, 15 aa, Severe acute respiratory syndrome-related coronavirus
  REGION 1..15: note = Table B: HLA-DRB1*04:05L HLA-DRB1*16:01L HLA-DRB1*15:03L
  source 1..15: note = Severe acute respiratory syndrome coronavirus 2
RLFARTRSMWSFNPE

SEQ ID NO: 17483 - protein, 13 aa, Severe acute respiratory syndrome-related coronavirus
  REGION 1..13: note = Table B: HLA-DRB1*04:05L HLA-DRB1*11:04L HLA-DPA1*01:03-B1*02:01L
  source 1..13: note = Severe acute respiratory syndrome coronavirus 2
HGTILTRPLLESE

SEQ ID NO: 17484 - protein, 15 aa, Severe acute respiratory syndrome-related coronavirus
  REGION 1..15: note = Table B: HLA-DRB1*04:05L HLA-DRB1*11:01L
  source 1..15: note = Severe acute respiratory syndrome coronavirus 2
SELVIGAVILRGHLR

SEQ ID NO: 17485 - protein, 12 aa, Severe acute respiratory syndrome-related coronavirus
  REGION 1..12: note = Table B: HLA-DRB1*04:05L HLA-DRB1*01:02L HLA-DRB3*02:01L
  source 1..12: note = Severe acute respiratory syndrome coronavirus 2
ITVATSRTLSYY

SEQ ID NO: 17486 - protein, 12 aa, Severe acute respiratory syndrome-related coronavirus
  REGION 1..12: note = Table B: HLA-DRB1*04:05L HLA-DQA1*01:02-B1*06:02L HLA-DRB1*14:02L HLA-DPA1*03:01-B1*105:01L HLA-DRB1*07:01L HLA-DRB1*10:01L
  source 1..12: note = Severe acute respiratory syndrome coronavirus 2
SYYKLGASQRVA

SEQ ID NO: 17487 - protein, 14 aa, Severe acute respiratory syndrome-related coronavirus
  REGION 1..14: note = Table B: HLA-DRB1*04:05L HLA-DRB1*01:02L HLA-DRB1*12:01L HLA-DRB1*16:01L
  source 1..14: note = Severe acute respiratory syndrome coronavirus 2
GASQRVAGDSGFAA

SEQ ID NO: 17488 - protein, 12 aa, Severe acute respiratory syndrome-related coronavirus
  REGION 1..12: note = Table B: HLA-DRB1*04:05L HLA-DRB1*01:02L HLA-DRB1*14:01L HLA-DRB1*08:01L HLA-DRB1*12:01L HLA-DRB1*16:01L HLA-DRB1*04:08L HLA-DRB1*15:03L
  source 1..12: note = Severe acute respiratory syndrome coronavirus 2
AAYSRYRIGNYK

SEQ ID NO: 17489 - protein, 13 aa, Severe acute respiratory syndrome-related coronavirus
  REGION 1..13: note = Table B: HLA-DRB1*04:05L HLA-DRB1*12:01L
  source 1..13: note = Severe acute respiratory syndrome coronavirus 2
RYRIGNYKLNTDH

SEQ ID NO: 17490 - protein, 15 aa, Severe acute respiratory syndrome-related coronavirus
  REGION 1..15: note = Table B: HLA-DRB1*04:05L HLA-DRB1*01:02L HLA-DRB1*12:01L
  source 1..15: note = Severe acute respiratory syndrome coronavirus 2
TDHSSSSDNIALLVQ

SEQ ID NO: 17491 - protein, 12 aa, Severe acute respiratory syndrome-related coronavirus
  REGION 1..12: note = Table B: HLA-DRB1*04:05L HLA-DQA1*05:01-B1*02:01L HLA-DRB1*16:01L
  source 1..12: note = Severe acute respiratory syndrome coronavirus 2
NKYSQLDEEQPM

SEQ ID NO: 17492 - protein, 12 aa, Severe acute respiratory syndrome-related coronavirus
  REGION 1..12: note = Table B: HLA-DRB1*04:05L HLA-DPA1*03:01-B1*105:01L
  source 1..12: note = Severe acute respiratory syndrome coronavirus 2
KYSQLDEEQPME

SEQ ID NO: 17493 - protein, 13 aa, Severe acute respiratory syndrome-related coronavirus
  REGION 1..13: note = Table B: HLA-DRB1*04:05L HLA-DRB1*11:04L HLA-DRB1*12:01L HLA-DPA1*01:02-B1*04:01L HLA-DQA1*02:01-B1*03:03L
  source 1..13: note = Severe acute respiratory syndrome coronavirus 2
ELYHYQECVRGTT

SEQ ID NO: 17494 - protein, 14 aa, Severe acute respiratory syndrome-related coronavirus
  REGION 1..14: note = Table B: HLA-DRB1*04:05L
  source 1..14: note = Severe acute respiratory syndrome coronavirus 2
LRARSVSPKLFIRQ

SEQ ID NO: 17495 - protein, 14 aa, Severe acute respiratory syndrome-related coronavirus
  REGION 1..14: note = Table B: HLA-DRB1*04:05L HLA-DRB1*08:04L
  source 1..14: note = Severe acute respiratory syndrome coronavirus 2
LFIRQEEVQELYSP

SEQ ID NO: 17496 - protein, 12 aa, Severe acute respiratory syndrome-related coronavirus
  REGION 1..12: note = Table B: HLA-DRB1*04:05L HLA-DPA1*01:03-B1*03:01L HLA-DPA1*02:01-B1*13:01L
  source 1..12: note = Severe acute respiratory syndrome coronavirus 2
EPKLGSLVVRCS

SEQ ID NO: 17497 - protein, 14 aa, Severe acute respiratory syndrome-related coronavirus
  REGION 1..14: note = Table B: HLA-DRB1*04:05L HLA-DQA1*01:02-B1*06:02L HLA-DRB1*01:02L HLA-DRB1*08:01L HLA-DRB1*12:01L HLA-DRB1*04:08L
  source 1..14: note = Severe acute respiratory syndrome coronavirus 2
IRGGDGKMKDLSPR

SEQ ID NO: 17498 - protein, 12 aa, Severe acute respiratory syndrome-related coronavirus
  REGION 1..12: note = Table B: HLA-DRB1*04:05L HLA-DQA1*01:02-B1*06:02L HLA-DRB1*01:02L HLA-DRB1*14:01L HLA-DQA1*05:05-B1*03:19L HLA-DRB1*04:10L HLA-DPA1*03:01-B1*105:01L HLA-DRB1*14:54L HLA-DQA1*05:05-B1*03:01L HLA-DQA1*01:03-B1*06:01L
  REGION 1..12: note = CONT. FROM ABOVE: HLA-DRB1*15:03L
  source 1..12: note = Severe acute respiratory syndrome coronavirus 2
AAIVLQLPQGTT

SEQ ID NO: 17499 - protein, 17 aa, Severe acute respiratory syndrome-related coronavirus
  REGION 1..17: note = Table B: HLA-DRB1*04:05L
  source 1..17: note = Severe acute respiratory syndrome coronavirus 2
LPQGTTLPKGFYAEGSR

SEQ ID NO: 17500 - protein, 15 aa, Severe acute respiratory syndrome-related coronavirus
  REGION 1..15: note = Table B: HLA-DRB1*04:05L HLA-DRB1*16:01L
  source 1..15: note = Severe acute respiratory syndrome coronavirus 2
GSRGGSQASSRSSSR

SEQ ID NO: 17501 - protein, 15 aa, Severe acute respiratory syndrome-related coronavirus
  REGION 1..15: note = Table B: HLA-DRB1*04:05L
  source 1..15: note = Severe acute respiratory syndrome coronavirus 2
ASSRSSSRSRNSSRN

SEQ ID NO: 17502 - protein, 13 aa, Severe acute respiratory syndrome-related coronavirus
  REGION 1..13: note = Table B: HLA-DRB1*04:05L HLA-DPA1*01:03-B1*03:01L HLA-DQA1*05:05-B1*03:19L HLA-DQA1*05:01-B1*02:01L
  source 1..13: note = Severe acute respiratory syndrome coronavirus 2
GGDAALALLLLDR

SEQ ID NO: 17503 - protein, 13 aa, Severe acute respiratory syndrome-related coronavirus
  REGION 1..13: note = Table B: HLA-DRB1*04:05L HLA-DRB1*01:02L
  source 1..13: note = Severe acute respiratory syndrome coronavirus 2
AALALLLLDRLNQ

SEQ ID NO: 17504 - protein, 13 aa, Severe acute respiratory syndrome-related coronavirus
  REGION 1..13: note = Table B: HLA-DRB1*04:05L HLA-DPA1*01:03-B1*02:01L
  source 1..13: note = Severe acute respiratory syndrome coronavirus 2
ALALLLLDRLNQL

SEQ ID NO: 17505 - protein, 13 aa, Severe acute respiratory syndrome-related coronavirus
  REGION 1..13: note = Table B: HLA-DRB1*04:05L HLA-DPA1*01:03-B1*03:01L HLA-DRB1*03:01L HLA-DPA1*01:03-B1*104:01L HLA-DQA1*05:05-B1*03:01L
  source 1..13: note = Severe acute respiratory syndrome coronavirus 2
LALLLLDRLNQLE

SEQ ID NO: 17506 - protein, 13 aa, Severe acute respiratory syndrome-related coronavirus
  REGION 1..13: note = Table B: HLA-DRB1*04:05L HLA-DRB1*03:01L
  source 1..13: note = Severe acute respiratory syndrome coronavirus 2
ALLLLDRLNQLES

SEQ ID NO: 17507 - protein, 14 aa, Severe acute respiratory syndrome-related coronavirus
  REGION 1..14: note = Table B: HLA-DRB1*04:05L HLA-DQA1*01:02-B1*06:02L HLA-DQA1*01:03-B1*06:01L HLA-DRB1*04:08L
  source 1..14: note = Severe acute respiratory syndrome coronavirus 2
SGKGQQQQGQTVTK

SEQ ID NO: 17508 - protein, 14 aa, Severe acute respiratory syndrome-related coronavirus
  REGION 1..14: note = Table B: HLA-DRB1*04:05L HLA-DRB1*04:08L
  source 1..14: note = Severe acute respiratory syndrome coronavirus 2
GKGQQQQGQTVTKK

SEQ ID NO: 17509 - protein, 16 aa, Severe acute respiratory syndrome-related coronavirus
  REGION 1..16: note = Table B: HLA-DRB1*04:05L HLA-DPA1*02:01-B1*13:01L HLA-DPA1*03:01-B1*105:01L HLA-DRB1*04:08L
  source 1..16: note = Severe acute respiratory syndrome coronavirus 2
GQQQQGQTVTKKSAAE

SEQ ID NO: 17510 - protein, 13 aa, Severe acute respiratory syndrome-related coronavirus
  REGION 1..13: note = Table B: HLA-DRB1*04:05L HLA-DRB1*08:01L
  source 1..13: note = Severe acute respiratory syndrome coronavirus 2
GQTVTKKSAAEAS

SEQ ID NO: 17511 - protein, 12 aa, Severe acute respiratory syndrome-related coronavirus
  REGION 1..12: note = Table B: HLA-DRB1*04:05L HLA-DRB1*01:02L HLA-DPA1*02:01-B1*13:01L
  source 1..12: note = Severe acute respiratory syndrome coronavirus 2
KRTATKAYNVTQ

SEQ ID NO: 17512 - protein, 14 aa, Severe acute respiratory syndrome-related coronavirus
  REGION 1..14: note = Table B: HLA-DRB1*04:05L HLA-DRB1*01:01L HLA-DRB3*01:01L HLA-DPA1*03:01-B1*105:01L HLA-DRB1*07:01L HLA-DRB1*15:01L
  source 1..14: note = Severe acute respiratory syndrome coronavirus 2
AYNVTQAFGRRGPE

SEQ ID NO: 17513 - protein, 16 aa, Severe acute respiratory syndrome-related coronavirus
  REGION 1..16: note = Table B: HLA-DRB1*04:05L HLA-DQA1*01:02-B1*06:02L HLA-DRB1*01:02L HLA-DRB1*12:01L HLA-DPA1*02:01-B1*13:01L
  source 1..16: note = Severe acute respiratory syndrome coronavirus 2
GRRGPEQTQGNFGDQE

SEQ ID NO: 17514 - protein, 14 aa, Severe acute respiratory syndrome-related coronavirus
  REGION 1..14: note = Table B: HLA-DRB1*04:05L HLA-DRB1*01:02L HLA-DPA1*02:01-B1*13:01L HLA-DQA1*03:01-B1*03:02L HLA-DQA1*02:01-B1*03:03L
  source 1..14: note = Severe acute respiratory syndrome coronavirus 2
DKKKKADETQALPQ

SEQ ID NO: 17515 - protein, 15 aa, Severe acute respiratory syndrome-related coronavirus
  REGION 1..15: note = Table B: HLA-DRB1*04:05L HLA-DRB1*12:01L HLA-DPA1*01:03-B1*104:01L
  source 1..15: note = Severe acute respiratory syndrome coronavirus 2
DDFSKQLQQSMSSAD

SEQ ID NO: 17516 - protein, 14 aa, Severe acute respiratory syndrome-related coronavirus
  REGION 1..14: note = Table B: HLA-DQA1*01:02-B1*06:02L
  source 1..14: note = Severe acute respiratory syndrome coronavirus 2
GFNEKTHVQLSLPV

SEQ ID NO: 17517 - protein, 14 aa, Severe acute respiratory syndrome-related coronavirus
  REGION 1..14: note = Table B: HLA-DQA1*01:02-B1*06:02L
  source 1..14: note = Severe acute respiratory syndrome coronavirus 2
FNEKTHVQLSLPVL

SEQ ID NO: 17518 - protein, 13 aa, Severe acute respiratory syndrome-related coronavirus
  REGION 1..13: note = Table B: HLA-DQA1*01:02-B1*06:02L HLA-DRB1*01:02L HLA-DRB1*12:01L HLA-DQA1*01:03-B1*06:01L HLA-DQA1*02:01-B1*03:03L HLA-DRB1*15:03L
  source 1..13: note = Severe acute respiratory syndrome coronavirus 2
EKTHVQLSLPVLQ

SEQ ID NO: 17519 - protein, 12 aa, Severe acute respiratory syndrome-related coronavirus
  REGION 1..12: note = Table B: HLA-DQA1*01:02-B1*06:02L HLA-DPA1*03:01-B1*105:01L
  source 1..12: note = Severe acute respiratory syndrome coronavirus 2
HVQLSLPVLQVR

SEQ ID NO: 17520 - protein, 12 aa, Severe acute respiratory syndrome-related coronavirus
  REGION 1..12: note = Table B: HLA-DQA1*01:02-B1*06:02L HLA-DPA1*03:01-B1*105:01L
  source 1..12: note = Severe acute respiratory syndrome coronavirus 2
VQLSLPVLQVRD

SEQ ID NO: 17521 - protein, 12 aa, Severe acute respiratory syndrome-related coronavirus
  REGION 1..12: note = Table B: HLA-DQA1*01:02-B1*06:02L HLA-DQA1*01:03-B1*06:01L HLA-DQA1*02:01-B1*03:03L
  source 1..12: note = Severe acute respiratory syndrome coronavirus 2
VRDVLVRGFGDS

SEQ ID NO: 17522 - protein, 12 aa, Severe acute respiratory syndrome-related coronavirus
  REGION 1..12: note = Table B: HLA-DQA1*01:02-B1*06:02L HLA-DPA1*03:01-B1*04:02L HLA-DRB1*12:01L HLA-DPA1*02:01-B1*13:01L HLA-DPA1*03:01-B1*105:01L HLA-DQA1*01:03-B1*06:01L HLA-DRB1*15:03L
  source 1..12: note = Severe acute respiratory syndrome coronavirus 2
VRGFGDSVEEVL

SEQ ID NO: 17523 - protein, 12 aa, Severe acute respiratory syndrome-related coronavirus
  REGION 1..12: note = Table B: HLA-DQA1*01:02-B1*06:02L HLA-DRB1*01:02L HLA-DRB1*14:01L HLA-DRB1*11:04L HLA-DRB1*08:01L HLA-DRB1*12:01L HLA-DRB3*01:01L HLA-DRB1*16:01L HLA-DRB1*04:08L HLA-DRB1*15:03L
  source 1..12: note = Severe acute respiratory syndrome coronavirus 2
VLSEARQHLKDG

SEQ ID NO: 17524 - protein, 12 aa, Severe acute respiratory syndrome-related coronavirus
  REGION 1..12: note = Table B: HLA-DQA1*01:02-B1*06:02L
  source 1..12: note = Severe acute respiratory syndrome coronavirus 2
LKDGTCGLVEVE

SEQ ID NO: 17525 - protein, 11 aa, Severe acute respiratory syndrome-related coronavirus
  REGION 1..11: note = Table B: HLA-DQA1*01:02-B1*06:02L HLA-DQA1*02:01-B1*03:03L
  source 1..11: note = Severe acute respiratory syndrome coronavirus 2
DGTCGLVEVEK

SEQ ID NO: 17526 - protein, 12 aa, Severe acute respiratory syndrome-related coronavirus
  REGION 1..12: note = Table B: HLA-DQA1*01:02-B1*06:02L
  source 1..12: note = Severe acute respiratory syndrome coronavirus 2
LEQPYVFIKRSD

SEQ ID NO: 17527 - protein, 12 aa, Severe acute respiratory syndrome-related coronavirus
  REGION 1..12: note = Table B: HLA-DQA1*01:02-B1*06:02L HLA-DQA1*01:03-B1*06:01L
  source 1..12: note = Severe acute respiratory syndrome coronavirus 2
SDARTAPHGHVM

SEQ ID NO: 17528 - protein, 12 aa, Severe acute respiratory syndrome-related coronavirus
  REGION 1..12: note = Table B: HLA-DQA1*01:02-B1*06:02L
  source 1..12: note = Severe acute respiratory syndrome coronavirus 2
MVELVAELEGIQ

SEQ ID NO: 17529 - protein, 13 aa, Severe acute respiratory syndrome-related coronavirus
  REGION 1..13: note = Table B: HLA-DQA1*01:02-B1*06:02L
  source 1..13: note = Severe acute respiratory syndrome coronavirus 2
GRSGETLGVLVPH

SEQ ID NO: 17530 - protein, 12 aa, Severe acute respiratory syndrome-related coronavirus
  REGION 1..12: note = Table B: HLA-DQA1*01:02-B1*06:02L HLA-DQA1*01:03-B1*06:01L
  source 1..12: note = Severe acute respiratory syndrome coronavirus 2
LGVLVPHVGEIP

SEQ ID NO: 17531 - protein, 14 aa, Severe acute respiratory syndrome-related coronavirus
  REGION 1..14: note = Table B: HLA-DQA1*01:02-B1*06:02L HLA-DRB1*11:04L HLA-DRB1*11:01L HLA-DRB1*13:01L
  source 1..14: note = Severe acute respiratory syndrome coronavirus 2
IPVAYRKVLLRKNG

SEQ ID NO: 17532 - protein, 15 aa, Severe acute respiratory syndrome-related coronavirus
  REGION 1..15: note = Table B: HLA-DQA1*01:02-B1*06:02L HLA-DPA1*03:01-B1*105:01L HLA-DQA1*03:01-B1*03:02L
  source 1..15: note = Severe acute respiratory syndrome coronavirus 2
LKSFDLGDELGTDPY

SEQ ID NO: 17533 - protein, 13 aa, Severe acute respiratory syndrome-related coronavirus
  REGION 1..13: note = Table B: HLA-DQA1*01:02-B1*06:02L HLA-DPA1*02:01-B1*13:01L
  source 1..13: note = Severe acute respiratory syndrome coronavirus 2
ELGTDPYEDFQEN

SEQ ID NO: 17534 - protein, 13 aa, Severe acute respiratory syndrome-related coronavirus
  REGION 1..13: note = Table B: HLA-DQA1*01:02-B1*06:02L
  source 1..13: note = Severe acute respiratory syndrome coronavirus 2
SSGVTRELMRELN

SEQ ID NO: 17535 - protein, 14 aa, Severe acute respiratory syndrome-related coronavirus
  REGION 1..14: note = Table B: HLA-DQA1*01:02-B1*06:02L
  source 1..14: note = Severe acute respiratory syndrome coronavirus 2
SGVTRELMRELNGG

SEQ ID NO: 17536 - protein, 14 aa, Severe acute respiratory syndrome-related coronavirus
  REGION 1..14: note = Table B: HLA-DQA1*01:02-B1*06:02L
  source 1..14: note = Severe acute respiratory syndrome coronavirus 2
GVTRELMRELNGGA

SEQ ID NO: 17537 - protein, 10 aa, Severe acute respiratory syndrome-related coronavirus
  REGION 1..10: note = Table B: HLA-DQA1*01:02-B1*06:02L HLA-DQA1*03:01-B1*03:02L HLA-DQA1*01:03-B1*06:01L HLA-DQA1*02:01-B1*03:03L
  source 1..10: note = Severe acute respiratory syndrome coronavirus 2
NGGAYTRYVD

SEQ ID NO: 17538 - protein, 11 aa, Severe acute respiratory syndrome-related coronavirus
  REGION 1..11: note = Table B: HLA-DQA1*01:02-B1*06:02L
  source 1..11: note = Severe acute respiratory syndrome coronavirus 2
GGAYTRYVDNN

SEQ ID NO: 17539 - protein, 14 aa, Severe acute respiratory syndrome-related coronavirus
  REGION 1..14: note = Table B: HLA-DQA1*01:02-B1*06:02L
  source 1..14: note = Severe acute respiratory syndrome coronavirus 2
RYVDNNFCGPDGYP

SEQ ID NO: 17540 - protein, 13 aa, Severe acute respiratory syndrome-related coronavirus
  REGION 1..13: note = Table B: HLA-DQA1*01:02-B1*06:02L HLA-DQA1*01:03-B1*06:01L
  source 1..13: note = Severe acute respiratory syndrome coronavirus 2
VDNNFCGPDGYPL

SEQ ID NO: 17541 - protein, 13 aa, Severe acute respiratory syndrome-related coronavirus
  REGION 1..13: note = Table B: HLA-DQA1*01:02-B1*06:02L HLA-DQA1*01:03-B1*06:01L
  source 1..13: note = Severe acute respiratory syndrome coronavirus 2
DNNFCGPDGYPLE

SEQ ID NO: 17542 - protein, 13 aa, Severe acute respiratory syndrome-related coronavirus
  REGION 1..13: note = Table B: HLA-DQA1*01:02-B1*06:02L HLA-DRB1*01:02L
  source 1..13: note = Severe acute respiratory syndrome coronavirus 2
PLECIKDLLARAG

SEQ ID NO: 17543 - protein, 13 aa, Severe acute respiratory syndrome-related coronavirus
  REGION 1..13: note = Table B: HLA-DQA1*01:02-B1*06:02L
  source 1..13: note = Severe acute respiratory syndrome coronavirus 2
ECIKDLLARAGKA

SEQ ID NO: 17544 - protein, 13 aa, Severe acute respiratory syndrome-related coronavirus
  REGION 1..13: note = Table B: HLA-DQA1*01:02-B1*06:02L
  source 1..13: note = Severe acute respiratory syndrome coronavirus 2
DLLARAGKASCTL

SEQ ID NO: 17545 - protein, 13 aa, Severe acute respiratory syndrome-related coronavirus
  REGION 1..13: note = Table B: HLA-DQA1*01:02-B1*06:02L
  source 1..13: note = Severe acute respiratory syndrome coronavirus 2
LARAGKASCTLSE

SEQ ID NO: 17546 - protein, 13 aa, Severe acute respiratory syndrome-related coronavirus
  REGION 1..13: note = Table B: HLA-DQA1*01:02-B1*06:02L
  source 1..13: note = Severe acute respiratory syndrome coronavirus 2
ARAGKASCTLSEQ

SEQ ID NO: 17547 - protein, 12 aa, Severe acute respiratory syndrome-related coronavirus
  REGION 1..12: note = Table B: HLA-DQA1*01:02-B1*06:02L HLA-DQA1*01:03-B1*06:01L
  source 1..12: note = Severe acute respiratory syndrome coronavirus 2
GKASCTLSEQLD

SEQ ID NO: 17548 - protein, 15 aa, Severe acute respiratory syndrome-related coronavirus
  REGION 1..15: note = Table B: HLA-DQA1*01:02-B1*06:02L HLA-DRB1*01:01L HLA-DRB1*11:01L HLA-DQA1*03:01-B1*03:02L HLA-DPA1*01:03-B1*104:01L HLA-DRB1*15:03L
  source 1..15: note = Severe acute respiratory syndrome coronavirus 2
IDTKRGVYCCREHEH

SEQ ID NO: 17549 - protein, 12 aa, Severe acute respiratory syndrome-related coronavirus
  REGION 1..12: note = Table B: HLA-DQA1*01:02-B1*06:02L HLA-DRB1*01:02L HLA-DRB1*08:01L HLA-DRB1*04:08L
  source 1..12: note = Severe acute respiratory syndrome coronavirus 2
RGVYCCREHEHE

SEQ ID NO: 17550 - protein, 13 aa, Severe acute respiratory syndrome-related coronavirus
  REGION 1..13: note = Table B: HLA-DQA1*01:02-B1*06:02L HLA-DRB1*08:01L
  source 1..13: note = Severe acute respiratory syndrome coronavirus 2
GVYCCREHEHEIA

SEQ ID NO: 17551 - protein, 12 aa, Severe acute respiratory syndrome-related coronavirus
  REGION 1..12: note = Table B: HLA-DQA1*01:02-B1*06:02L HLA-DRB1*01:02L HLA-DRB1*12:01L HLA-DPA1*02:01-B1*13:01L HLA-DPA1*03:01-B1*105:01L HLA-DQA1*01:03-B1*06:01L HLA-DRB1*15:03L
  source 1..12: note = Severe acute respiratory syndrome coronavirus 2
YTERSEKSYELQ

SEQ ID NO: 17552 - protein, 12 aa, Severe acute respiratory syndrome-related coronavirus
  REGION 1..12: note = Table B: HLA-DQA1*01:02-B1*06:02L HLA-DQA1*01:03-B1*06:01L
  source 1..12: note = Severe acute respiratory syndrome coronavirus 2
LQTPFEIKLAKK

SEQ ID NO: 17553 - protein, 12 aa, Severe acute respiratory syndrome-related coronavirus
  REGION 1..12: note = Table B: HLA-DQA1*01:02-B1*06:02L HLA-DRB1*08:04L HLA-DRB1*14:01L HLA-DRB1*08:01L
  source 1..12: note = Severe acute respiratory syndrome coronavirus 2
EIKLAKKFDTFN

SEQ ID NO: 17554 - protein, 10 aa, Severe acute respiratory syndrome-related coronavirus
  REGION 1..10: note = Table B: HLA-DQA1*01:02-B1*06:02L HLA-DPA1*02:01-B1*13:01L HLA-DPA1*03:01-B1*105:01L HLA-DQA1*02:01-B1*03:03L HLA-DRB1*15:03L
  source 1..10: note = Severe acute respiratory syndrome coronavirus 2
DTFNGECPNF

SEQ ID NO: 17555 - protein, 12 aa, Severe acute respiratory syndrome-related coronavirus
  REGION 1..12: note = Table B: HLA-DQA1*01:02-B1*06:02L HLA-DQA1*01:03-B1*06:01L
  source 1..12: note = Severe acute respiratory syndrome coronavirus 2
NGECPNFVFPLN

SEQ ID NO: 17556 - protein, 12 aa, Severe acute respiratory syndrome-related coronavirus
  REGION 1..12: note = Table B: HLA-DQA1*01:02-B1*06:02L
  source 1..12: note = Severe acute respiratory syndrome coronavirus 2
PNFVFPLNSIIK

SEQ ID NO: 17557 - protein, 12 aa, Severe acute respiratory syndrome-related coronavirus
  REGION 1..12: note = Table B: HLA-DQA1*01:02-B1*06:02L
  source 1..12: note = Severe acute respiratory syndrome coronavirus 2
PLNSIIKTIQPR

SEQ ID NO: 17558 - protein, 12 aa, Severe acute respiratory syndrome-related coronavirus
  REGION 1..12: note = Table B: HLA-DQA1*01:02-B1*06:02L HLA-DQA1*01:03-B1*06:01L
  source 1..12: note = Severe acute respiratory syndrome coronavirus 2
DGFMGRIRSVYP

SEQ ID NO: 17559 - protein, 12 aa, Severe acute respiratory syndrome-related coronavirus
  REGION 1..12: note = Table B: HLA-DQA1*01:02-B1*06:02L
  source 1..12: note = Severe acute respiratory syndrome coronavirus 2
GFMGRIRSVYPV

SEQ ID NO: 17560 - protein, 13 aa, Severe acute respiratory syndrome-related coronavirus
  REGION 1..13: note = Table B: HLA-DQA1*01:02-B1*06:02L
  source 1..13: note = Severe acute respiratory syndrome coronavirus 2
SPNECNQMCLSTL

SEQ ID NO: 17561 - protein, 14 aa, Severe acute respiratory syndrome-related coronavirus
  REGION 1..14: note = Table B: HLA-DQA1*01:02-B1*06:02L
  source 1..14: note = Severe acute respiratory syndrome coronavirus 2
PNECNQMCLSTLMK

SEQ ID NO: 17562 - protein, 13 aa, Severe acute respiratory syndrome-related coronavirus
  REGION 1..13: note = Table B: HLA-DQA1*01:02-B1*06:02L
  source 1..13: note = Severe acute respiratory syndrome coronavirus 2
NQMCLSTLMKCDH

SEQ ID NO: 17563 - protein, 14 aa, Severe acute respiratory syndrome-related coronavirus
  REGION 1..14: note = Table B: HLA-DQA1*01:02-B1*06:02L
  source 1..14: note = Severe acute respiratory syndrome coronavirus 2
MKCDHCGETSWQTG

SEQ ID NO: 17564 - protein, 12 aa, Severe acute respiratory syndrome-related coronavirus
  REGION 1..12: note = Table B: HLA-DQA1*01:02-B1*06:02L HLA-DQA1*05:05-B1*03:01L HLA-DQA1*01:03-B1*06:01L
  source 1..12: note = Severe acute respiratory syndrome coronavirus 2
DHCGETSWQTGD

SEQ ID NO: 17565 - protein, 13 aa, Severe acute respiratory syndrome-related coronavirus
  REGION 1..13: note = Table B: HLA-DQA1*01:02-B1*06:02L HLA-DQA1*01:03-B1*06:01L
  source 1..13: note = Severe acute respiratory syndrome coronavirus 2
DFVKATCEFCGTE

SEQ ID NO: 17566 - protein, 12 aa, Severe acute respiratory syndrome-related coronavirus
  REGION 1..12: note = Table B: HLA-DQA1*01:02-B1*06:02L HLA-DQA1*01:03-B1*06:01L
  source 1..12: note = Severe acute respiratory syndrome coronavirus 2
VKATCEFCGTEN

SEQ ID NO: 17567 - protein, 12 aa, Severe acute respiratory syndrome-related coronavirus
  REGION 1..12: note = Table B: HLA-DQA1*01:02-B1*06:02L HLA-DQA1*03:01-B1*03:02L HLA-DQA1*05:05-B1*03:01L HLA-DQA1*02:01-B1*03:03L
  source 1..12: note = Severe acute respiratory syndrome coronavirus 2
EFCGTENLTKEG

SEQ ID NO: 17568 - protein, 11 aa, Severe acute respiratory syndrome-related coronavirus
  REGION 1..11: note = Table B: HLA-DQA1*01:02-B1*06:02L HLA-DQA1*02:01-B1*03:03L
  source 1..11: note = Severe acute respiratory syndrome coronavirus 2
LTKEGATTCGY

SEQ ID NO: 17569 - protein, 12 aa, Severe acute respiratory syndrome-related coronavirus
  REGION 1..12: note = Table B: HLA-DQA1*01:02-B1*06:02L
  source 1..12: note = Severe acute respiratory syndrome coronavirus 2
EGATTCGYLPQN

SEQ ID NO: 17570 - protein, 12 aa, Severe acute respiratory syndrome-related coronavirus
  REGION 1..12: note = Table B: HLA-DQA1*01:02-B1*06:02L
  source 1..12: note = Severe acute respiratory syndrome coronavirus 2
GATTCGYLPQNA

SEQ ID NO: 17571 - protein, 12 aa, Severe acute respiratory syndrome-related coronavirus
  REGION 1..12: note = Table B: HLA-DQA1*01:02-B1*06:02L
  source 1..12: note = Severe acute respiratory syndrome coronavirus 2
ATTCGYLPQNAV

SEQ ID NO: 17572 - protein, 14 aa, Severe acute respiratory syndrome-related coronavirus
  REGION 1..14: note = Table B: HLA-DQA1*01:02-B1*06:02L
  source 1..14: note = Severe acute respiratory syndrome coronavirus 2
IYCPACHNSEVGPE

SEQ ID NO: 17573 - protein, 10 aa, Severe acute respiratory syndrome-related coronavirus
  REGION 1..10: note = Table B: HLA-DQA1*01:02-B1*06:02L HLA-DQA1*05:05-B1*03:19L HLA-DRB4*01:01L HLA-DPA1*01:03-B1*04:01L
  source 1..10: note = Severe acute respiratory syndrome coronavirus 2
IAFGGCVFSY

SEQ ID NO: 17574 - protein, 14 aa, Severe acute respiratory syndrome-related coronavirus
  REGION 1..14: note = Table B: HLA-DQA1*01:02-B1*06:02L HLA-DRB1*01:02L
  source 1..14: note = Severe acute respiratory syndrome coronavirus 2
YVGCHNKCAYWVPR

SEQ ID NO: 17575 - protein, 15 aa, Severe acute respiratory syndrome-related coronavirus
  REGION 1..15: note = Table B: HLA-DQA1*01:02-B1*06:02L
  source 1..15: note = Severe acute respiratory syndrome coronavirus 2
VGCHNKCAYWVPRAS

SEQ ID NO: 17576 - protein, 13 aa, Severe acute respiratory syndrome-related coronavirus
  REGION 1..13: note = Table B: HLA-DQA1*01:02-B1*06:02L
  source 1..13: note = Severe acute respiratory syndrome coronavirus 2
NKCAYWVPRASAN

SEQ ID NO: 17577 - protein, 12 aa, Severe acute respiratory syndrome-related coronavirus
  REGION 1..12: note = Table B: HLA-DQA1*01:02-B1*06:02L HLA-DQA1*01:03-B1*06:01L
  source 1..12: note = Severe acute respiratory syndrome coronavirus 2
WVPRASANIGCN

SEQ ID NO: 17578 - protein, 12 aa, Severe acute respiratory syndrome-related coronavirus
  REGION 1..12: note = Table B: HLA-DQA1*01:02-B1*06:02L HLA-DQA1*01:03-B1*06:01L
  source 1..12: note = Severe acute respiratory syndrome coronavirus 2
IGCNHTGVVGEG

SEQ ID NO: 17579 - protein, 14 aa, Severe acute respiratory syndrome-related coronavirus
  REGION 1..14: note = Table B: HLA-DQA1*01:02-B1*06:02L HLA-DPA1*03:01-B1*105:01L HLA-DQA1*02:01-B1*03:03L
  source 1..14: note = Severe acute respiratory syndrome coronavirus 2
VGEGSEGLNDNLLE

SEQ ID NO: 17580 - protein, 13 aa, Severe acute respiratory syndrome-related coronavirus
  REGION 1..13: note = Table B: HLA-DQA1*01:02-B1*06:02L
  source 1..13: note = Severe acute respiratory syndrome coronavirus 2
EGLNDNLLEILQK

SEQ ID NO: 17581 - protein, 12 aa, Severe acute respiratory syndrome-related coronavirus
  REGION 1..12: note = Table B: HLA-DQA1*01:02-B1*06:02L HLA-DPA1*03:01-B1*105:01L HLA-DQA1*02:01-B1*03:03L
  source 1..12: note = Severe acute respiratory syndrome coronavirus 2
LNDNLLEILQKE

SEQ ID NO: 17582 - protein, 11 aa, Severe acute respiratory syndrome-related coronavirus
  REGION 1..11: note = Table B: HLA-DQA1*01:02-B1*06:02L HLA-DPA1*01:02-B1*04:01L HLA-DQA1*01:03-B1*06:01L HLA-DQA1*02:01-B1*03:03L
  source 1..11: note = Severe acute respiratory syndrome coronavirus 2
DNLLEILQKEK

SEQ ID NO: 17583 - protein, 14 aa, Severe acute respiratory syndrome-related coronavirus
  REGION 1..14: note = Table B: HLA-DQA1*01:02-B1*06:02L HLA-DRB1*01:02L
  source 1..14: note = Severe acute respiratory syndrome coronavirus 2
LQKEKVNINIVGDF

SEQ ID NO: 17584 - protein, 12 aa, Severe acute respiratory syndrome-related coronavirus
  REGION 1..12: note = Table B: HLA-DQA1*01:02-B1*06:02L HLA-DRB1*08:04L HLA-DRB1*08:77L HLA-DRB3*02:01L HLA-DPA1*03:01-B1*04:02L HLA-DRB1*03:01L HLA-DRB1*11:04L HLA-DQA1*01:01-B1*05:01L HLA-DRB1*08:01L HLA-DRB4*01:01L HLA-DPA1*01:03-B1*04:01L
  REGION 1..12: note = CONT. FROM ABOVE: HLA-DRB1*04:10L HLA-DPA1*01:03-B1*04:02L HLA-D RB3*01:01L HLA-DPA1*02:01-B1*13:01L HLA-DQA1*05:05-B1*03:01L HLA -DRB1*08:03L
  source 1..12: note = Severe acute respiratory syndrome coronavirus 2
IVGDFKLNEEIA

SEQ ID NO: 17585 - protein, 14 aa, Severe acute respiratory syndrome-related coronavirus
  REGION 1..14: note = Table B: HLA-DQA1*01:02-B1*06:02L HLA-DPA1*01:03-B1*03:01L HLA-DQA1*05:05-B1*03:19L HLA-DQA1*05:05-B1*03:01L HLA-DRB1*16:01L
  source 1..14: note = Severe acute respiratory syndrome coronavirus 2
DFKLNEEIAIILAS

SEQ ID NO: 17586 - protein, 13 aa, Severe acute respiratory syndrome-related coronavirus
  REGION 1..13: note = Table B: HLA-DQA1*01:02-B1*06:02L
  source 1..13: note = Severe acute respiratory syndrome coronavirus 2
EIAIILASFSAST

SEQ ID NO: 17587 - protein, 14 aa, Severe acute respiratory syndrome-related coronavirus
  REGION 1..14: note = Table B: HLA-DQA1*01:02-B1*06:02L HLA-DPA1*02:01-B1*13:01L HLA-DPA1*03:01-B1*105:01L
  source 1..14: note = Severe acute respiratory syndrome coronavirus 2
DYKAFKQIVESCGN

SEQ ID NO: 17588 - protein, 12 aa, Severe acute respiratory syndrome-related coronavirus
  REGION 1..12: note = Table B: HLA-DQA1*01:02-B1*06:02L
  source 1..12: note = Severe acute respiratory syndrome coronavirus 2
FKQIVESCGNFK

SEQ ID NO: 17589 - protein, 11 aa, Severe acute respiratory syndrome-related coronavirus
  REGION 1..11: note = Table B: HLA-DQA1*01:02-B1*06:02L HLA-DQA1*01:03-B1*06:01L
  source 1..11: note = Severe acute respiratory syndrome coronavirus 2
IVESCGNFKVT

SEQ ID NO: 17590 - protein, 12 aa, Severe acute respiratory syndrome-related coronavirus
  REGION 1..12: note = Table B: HLA-DQA1*01:02-B1*06:02L HLA-DQA1*01:03-B1*06:01L
  source 1..12: note = Severe acute respiratory syndrome coronavirus 2
VESCGNFKVTKG

SEQ ID NO: 17591 - protein, 12 aa, Severe acute respiratory syndrome-related coronavirus
  REGION 1..12: note = Table B: HLA-DQA1*01:02-B1*06:02L
  source 1..12: note = Severe acute respiratory syndrome coronavirus 2
VTKGKAKKGAWN

SEQ ID NO: 17592 - protein, 10 aa, Severe acute respiratory syndrome-related coronavirus
  REGION 1..10: note = Table B: HLA-DQA1*01:02-B1*06:02L HLA-DQA1*05:05-B1*03:19L HLA-DQA1*05:01-B1*02:01L HLA-DPA1*02:01-B1*13:01L HLA-DPA1*03:01-B1*105:01L HLA-DQA1*01:03-B1*06:01L HLA-DQA1*02:01-B1*03:03L HLA-DRB1*15:03L
  source 1..10: note = Severe acute respiratory syndrome coronavirus 2
KSILSPLYAF

SEQ ID NO: 17593 - protein, 12 aa, Severe acute respiratory syndrome-related coronavirus
  REGION 1..12: note = Table B: HLA-DQA1*01:02-B1*06:02L HLA-DRB1*12:01L
  source 1..12: note = Severe acute respiratory syndrome coronavirus 2
VVRSIFSRTLET

SEQ ID NO: 17594 - protein, 11 aa, Severe acute respiratory syndrome-related coronavirus
  REGION 1..11: note = Table B: HLA-DQA1*01:02-B1*06:02L
  source 1..11: note = Severe acute respiratory syndrome coronavirus 2
TLETAQNSVRV

SEQ ID NO: 17595 - protein, 12 aa, Severe acute respiratory syndrome-related coronavirus
  REGION 1..12: note = Table B: HLA-DQA1*01:02-B1*06:02L HLA-DQA1*01:03-B1*06:01L
  source 1..12: note = Severe acute respiratory syndrome coronavirus 2
AQNSVRVLQKAA

SEQ ID NO: 17596 - protein, 14 aa, Severe acute respiratory syndrome-related coronavirus
  REGION 1..14: note = Table B: HLA-DQA1*01:02-B1*06:02L HLA-DPA1*01:03-B1*104:01L
  source 1..14: note = Severe acute respiratory syndrome coronavirus 2
SVRVLQKAAITILD

SEQ ID NO: 17597 - protein, 12 aa, Severe acute respiratory syndrome-related coronavirus
  REGION 1..12: note = Table B: HLA-DQA1*01:02-B1*06:02L HLA-DQA1*01:03-B1*06:01L
  source 1..12: note = Severe acute respiratory syndrome coronavirus 2
QKAAITILDGIS

SEQ ID NO: 17598 - protein, 10 aa, Severe acute respiratory syndrome-related coronavirus
  REGION 1..10: note = Table B: HLA-DQA1*01:02-B1*06:02L HLA-DQA1*01:03-B1*06:01L
  source 1..10: note = Severe acute respiratory syndrome coronavirus 2
QYSLRLIDAM

SEQ ID NO: 17599 - protein, 12 aa, Severe acute respiratory syndrome-related coronavirus
  REGION 1..12: note = Table B: HLA-DQA1*01:02-B1*06:02L
  source 1..12: note = Severe acute respiratory syndrome coronavirus 2
NNLVVMAYITGG

SEQ ID NO: 17600 - protein, 13 aa, Severe acute respiratory syndrome-related coronavirus
  REGION 1..13: note = Table B: HLA-DQA1*01:02-B1*06:02L HLA-DRB1*12:01L HLA-DRB1*15:03L
  source 1..13: note = Severe acute respiratory syndrome coronavirus 2
NLVVMAYITGGVV

SEQ ID NO: 17601 - protein, 10 aa, Severe acute respiratory syndrome-related coronavirus
  REGION 1..10: note = Table B: HLA-DQA1*01:02-B1*06:02L
  source 1..10: note = Severe acute respiratory syndrome coronavirus 2
GGVVQLTSQW

SEQ ID NO: 17602 - protein, 13 aa, Severe acute respiratory syndrome-related coronavirus
  REGION 1..13: note = Table B: HLA-DQA1*01:02-B1*06:02L HLA-DPA1*03:01-B1*04:02L HLA-DQA1*05:05-B1*03:19L HLA-DPA1*01:03-B1*04:02L
  source 1..13: note = Severe acute respiratory syndrome coronavirus 2
VVQLTSQWLTNIF

SEQ ID NO: 17603 - protein, 12 aa, Severe acute respiratory syndrome-related coronavirus
  REGION 1..12: note = Table B: HLA-DQA1*01:02-B1*06:02L
  source 1..12: note = Severe acute respiratory syndrome coronavirus 2
QLTSQWLTNIFG

SEQ ID NO: 17604 - protein, 12 aa, Severe acute respiratory syndrome-related coronavirus
  REGION 1..12: note = Table B: HLA-DQA1*01:02-B1*06:02L HLA-DQA1*01-B1*05L HLA-DQA1*05:01-B1*02:01L HLA-DPA1*01:03-B1*04:01L HLA-DPA1*01:03-B1*04:02L HLA-DPA1*03:01-B1*105:01L HLA-DPA1*01:02-B1*04:01L HLA-DRB1*16:01L
  REGION 1..12: note = CONT. FROM ABOVE: HLA-DQA1*01:03-B1*06:01L HLA-DRB1*15:03L
  source 1..12: note = Severe acute respiratory syndrome coronavirus 2
TSQWLTNIFGTV

SEQ ID NO: 17605 - protein, 10 aa, Severe acute respiratory syndrome-related coronavirus
  REGION 1..10: note = Table B: HLA-DQA1*01:02-B1*06:02L HLA-DRB1*08:77L HLA-DPA1*01:03-B1*03:01L HLA-DPA1*03:01-B1*04:02L HLA-DRB1*03:01L HLA-DRB1*11:02L HLA-DRB1*14:02L HLA-DQA1*01-B1*05L HLA-DQA1*05:05-B1*03:19M
  REGION 1..10: note = CONT. FROM ABOVE: HLA-DQA1*05:01-B1*02:01L HLA-DRB4*01:01L HLA-D PA1*01:03-B1*04:01L HLA-DQA1*05:05-B1*03:116L HLA-DPA1*01:03-B1* 04:02L HLA-DPA1*02:01-B1*13:01L HLA-DPA1*03:01-B1*105:01L HLA-DP A1*01:03-B1*104:01L HLA-DRB1*10:01L HLA-DRB1*16:01L
  REGION 1..10: note = CONT. FROM ABOVE: HLA-DRB1*15:03L
  source 1..10: note = Severe acute respiratory syndrome coronavirus 2
WLTNIFGTVY

SEQ ID NO: 17606 - protein, 11 aa, Severe acute respiratory syndrome-related coronavirus
  REGION 1..11: note = Table B: HLA-DQA1*01:02-B1*06:02L HLA-DRB1*12:01L HLA-DQA1*02:01-B1*03:03L
  source 1..11: note = Severe acute respiratory syndrome coronavirus 2
IFGTVYEKLKP

SEQ ID NO: 17607 - protein, 10 aa, Severe acute respiratory syndrome-related coronavirus
  REGION 1..10: note = Table B: HLA-DQA1*01:02-B1*06:02L HLA-DPA1*02:01-B1*13:01L HLA-DQA1*01:03-B1*06:01L HLA-DQA1*02:01-B1*03:03L HLA-DRB1*15:03L
  source 1..10: note = Severe acute respiratory syndrome coronavirus 2
PVLDWLEEKF

SEQ ID NO: 17608 - protein, 10 aa, Severe acute respiratory syndrome-related coronavirus
  REGION 1..10: note = Table B: HLA-DQA1*01:02-B1*06:02L HLA-DPA1*03:01-B1*105:01L
  source 1..10: note = Severe acute respiratory syndrome coronavirus 2
EGVEFLRDGW

SEQ ID NO: 17609 - protein, 12 aa, Severe acute respiratory syndrome-related coronavirus
  REGION 1..12: note = Table B: HLA-DQA1*01:02-B1*06:02L HLA-DPA1*03:01-B1*105:01L
  source 1..12: note = Severe acute respiratory syndrome coronavirus 2
KFISTCACEIVG

SEQ ID NO: 17610 - protein, 12 aa, Severe acute respiratory syndrome-related coronavirus
  REGION 1..12: note = Table B: HLA-DQA1*01:02-B1*06:02L
  source 1..12: note = Severe acute respiratory syndrome coronavirus 2
FISTCACEIVGG

SEQ ID NO: 17611 - protein, 12 aa, Severe acute respiratory syndrome-related coronavirus
  REGION 1..12: note = Table B: HLA-DQA1*01:02-B1*06:02L HLA-DPA1*03:01-B1*105:01L HLA-DQA1*05:05-B1*03:01L HLA-DQA1*01:03-B1*06:01L
  source 1..12: note = Severe acute respiratory syndrome coronavirus 2
ISTCACEIVGGQ

SEQ ID NO: 17612 - protein, 14 aa, Severe acute respiratory syndrome-related coronavirus
  REGION 1..14: note = Table B: HLA-DQA1*01:02-B1*06:02L
  source 1..14: note = Severe acute respiratory syndrome coronavirus 2
STCACEIVGGQIVT

SEQ ID NO: 17613 - protein, 12 aa, Severe acute respiratory syndrome-related coronavirus
  REGION 1..12: note = Table B: HLA-DQA1*01:02-B1*06:02L HLA-DQA1*01:03-B1*06:01L
  source 1..12: note = Severe acute respiratory syndrome coronavirus 2
VTCAKEIKESVQ

SEQ ID NO: 17614 - protein, 13 aa, Severe acute respiratory syndrome-related coronavirus
  REGION 1..13: note = Table B: HLA-DQA1*01:02-B1*06:02L HLA-DPA1*03:01-B1*04:02L HLA-DRB1*14:01L HLA-DRB1*12:01L HLA-DPA1*03:01-B1*105:01L HLA-DRB1*16:01L HLA-DQA1*01:03-B1*06:01L HLA-DRB1*04:08L HLA-DRB1*15:03L
  source 1..13: note = Severe acute respiratory syndrome coronavirus 2
IKESVQTFFKLVN

SEQ ID NO: 17615 - protein, 12 aa, Severe acute respiratory syndrome-related coronavirus
  REGION 1..12: note = Table B: HLA-DQA1*01:02-B1*06:02L HLA-DRB1*01:02L HLA-DRB1*14:01L
  source 1..12: note = Severe acute respiratory syndrome coronavirus 2
ESVQTFFKLVNK

SEQ ID NO: 17616 - protein, 12 aa, Severe acute respiratory syndrome-related coronavirus
  REGION 1..12: note = Table B: HLA-DQA1*01:02-B1*06:02L HLA-DPA1*03:01-B1*04:02L HLA-DPA1*01:03-B1*04:02L HLA-DPA1*03:01-B1*105:01L HLA-DPA1*01:02-B1*04:01L
  source 1..12: note = Severe acute respiratory syndrome coronavirus 2
LVNKFLALCADS

SEQ ID NO: 17617 - protein, 12 aa, Severe acute respiratory syndrome-related coronavirus
  REGION 1..12: note = Table B: HLA-DQA1*01:02-B1*06:02L
  source 1..12: note = Severe acute respiratory syndrome coronavirus 2
LCADSIIIGGAK

SEQ ID NO: 17618 - protein, 10 aa, Severe acute respiratory syndrome-related coronavirus
  REGION 1..10: note = Table B: HLA-DQA1*01:02-B1*06:02L HLA-DQA1*01:03-B1*06:01L HLA-DQA1*02:01-B1*03:03L
  source 1..10: note = Severe acute respiratory syndrome coronavirus 2
LKALNLGETF

SEQ ID NO: 17619 - protein, 12 aa, Severe acute respiratory syndrome-related coronavirus
  REGION 1..12: note = Table B: HLA-DQA1*01:02-B1*06:02L HLA-DQA1*01:03-B1*06:01L
  source 1..12: note = Severe acute respiratory syndrome coronavirus 2
ALNLGETFVTHS

SEQ ID NO: 17620 - protein, 14 aa, Severe acute respiratory syndrome-related coronavirus
  REGION 1..14: note = Table B: HLA-DQA1*01:02-B1*06:02L HLA-DRB1*14:01L HLA-DRB1*12:01L HLA-DRB3*01:01L
  source 1..14: note = Severe acute respiratory syndrome coronavirus 2
SKGLYRKCVKSREE

SEQ ID NO: 17621 - protein, 12 aa, Severe acute respiratory syndrome-related coronavirus
  REGION 1..12: note = Table B: HLA-DQA1*01:02-B1*06:02L
  source 1..12: note = Severe acute respiratory syndrome coronavirus 2
YRKCVKSREETG

SEQ ID NO: 17622 - protein, 11 aa, Severe acute respiratory syndrome-related coronavirus
  REGION 1..11: note = Table B: HLA-DQA1*01:02-B1*06:02L
  source 1..11: note = Severe acute respiratory syndrome coronavirus 2
ETGLLMPLKAP

SEQ ID NO: 17623 - protein, 10 aa, Severe acute respiratory syndrome-related coronavirus
  REGION 1..10: note = Table B: HLA-DQA1*01:02-B1*06:02L HLA-DQA1*01:03-B1*06:01L HLA-DQA1*02:01-B1*03:03L
  source 1..10: note = Severe acute respiratory syndrome coronavirus 2
PLKAPKEIIF

SEQ ID NO: 17624 - protein, 13 aa, Severe acute respiratory syndrome-related coronavirus
  REGION 1..13: note = Table B: HLA-DQA1*01:02-B1*06:02L HLA-DPA1*02:01-B1*13:01L
  source 1..13: note = Severe acute respiratory syndrome coronavirus 2
KAPKEIIFLEGET

SEQ ID NO: 17625 - protein, 14 aa, Severe acute respiratory syndrome-related coronavirus
  REGION 1..14: note = Table B: HLA-DQA1*01:02-B1*06:02L HLA-DQA1*05:05-B1*03:01L
  source 1..14: note = Severe acute respiratory syndrome coronavirus 2
LEGETLPTEVLTEE

SEQ ID NO: 17626 - protein, 12 aa, Severe acute respiratory syndrome-related coronavirus
  REGION 1..12: note = Table B: HLA-DQA1*01:02-B1*06:02L HLA-DQA1*05:01-B1*02:01L HLA-DPA1*03:01-B1*105:01L HLA-DQA1*01:03-B1*06:01L HLA-DQA1*02:01-B1*03:03L
  source 1..12: note = Severe acute respiratory syndrome coronavirus 2
LTEEVVLKTGDL

SEQ ID NO: 17627 - protein, 12 aa, Severe acute respiratory syndrome-related coronavirus
  REGION 1..12: note = Table B: HLA-DQA1*01:02-B1*06:02L HLA-DQA1*02:01-B1*03:03L
  source 1..12: note = Severe acute respiratory syndrome coronavirus 2
TEEVVLKTGDLQ

SEQ ID NO: 17628 - protein, 11 aa, Severe acute respiratory syndrome-related coronavirus
  REGION 1..11: note = Table B: HLA-DQA1*01:02-B1*06:02L HLA-DPA1*03:01-B1*105:01L HLA-DQA1*03:01-B1*03:02L HLA-DQA1*02:01-B1*03:03L
  source 1..11: note = Severe acute respiratory syndrome coronavirus 2
VVLKTGDLQPL

SEQ ID NO: 17629 - protein, 10 aa, Severe acute respiratory syndrome-related coronavirus
  REGION 1..10: note = Table B: HLA-DQA1*01:02-B1*06:02L HLA-DPA1*03:01-B1*105:01L HLA-DQA1*01:03-B1*06:01M HLA-DQA1*02:01-B1*03:03L
  source 1..10: note = Severe acute respiratory syndrome coronavirus 2
LKTGDLQPLE

SEQ ID NO: 17630 - protein, 13 aa, Severe acute respiratory syndrome-related coronavirus
  REGION 1..13: note = Table B: HLA-DQA1*01:02-B1*06:02L
  source 1..13: note = Severe acute respiratory syndrome coronavirus 2
PLVGTPVCINGLM

SEQ ID NO: 17631 - protein, 10 aa, Severe acute respiratory syndrome-related coronavirus
  REGION 1..10: note = Table B: HLA-DQA1*01:02-B1*06:02L HLA-DPA1*03:01-B1*04:02L HLA-DPA1*03:01-B1*105:01L HLA-DPA1*01:02-B1*04:01L HLA-DQA1*01:03-B1*06:01L
  source 1..10: note = Severe acute respiratory syndrome coronavirus 2
INGLMLLEIK

SEQ ID NO: 17632 - protein, 12 aa, Severe acute respiratory syndrome-related coronavirus
  REGION 1..12: note = Table B: HLA-DQA1*01:02-B1*06:02L HLA-DPA1*03:01-B1*105:01L HLA-DQA1*01:03-B1*06:01L HLA-DQA1*02:01-B1*03:03L
  source 1..12: note = Severe acute respiratory syndrome coronavirus 2
NGLMLLEIKDTE

SEQ ID NO: 17633 - protein, 11 aa, Severe acute respiratory syndrome-related coronavirus
  REGION 1..11: note = Table B: HLA-DQA1*01:02-B1*06:02L HLA-DQA1*01:03-B1*06:01L
  source 1..11: note = Severe acute respiratory syndrome coronavirus 2
EKYCALAPNMM

SEQ ID NO: 17634 - protein, 13 aa, Severe acute respiratory syndrome-related coronavirus
  REGION 1..13: note = Table B: HLA-DQA1*01:02-B1*06:02L HLA-DQA1*01:03-B1*06:01L
  source 1..13: note = Severe acute respiratory syndrome coronavirus 2
VTNNTFTLKGGAP

SEQ ID NO: 17635 - protein, 12 aa, Severe acute respiratory syndrome-related coronavirus
  REGION 1..12: note = Table B: HLA-DQA1*01:02-B1*06:02L HLA-DRB1*08:04L HLA-DRB1*14:01L HLA-DRB1*11:01L HLA-DRB1*04:08L HLA-DRB1*15:03L
  source 1..12: note = Severe acute respiratory syndrome coronavirus 2
NTFTLKGGAPTK

SEQ ID NO: 17636 - protein, 11 aa, Severe acute respiratory syndrome-related coronavirus
  REGION 1..11: note = Table B: HLA-DQA1*01:02-B1*06:02L HLA-DQA1*05:05-B1*03:19L
  source 1..11: note = Severe acute respiratory syndrome coronavirus 2
TLKGGAPTKVT

SEQ ID NO: 17637 - protein, 12 aa, Severe acute respiratory syndrome-related coronavirus
  REGION 1..12: note = Table B: HLA-DQA1*01:02-B1*06:02L HLA-DQA1*05:05-B1*03:19L
  source 1..12: note = Severe acute respiratory syndrome coronavirus 2
LKGGAPTKVTFG

SEQ ID NO: 17638 - protein, 13 aa, Severe acute respiratory syndrome-related coronavirus
  REGION 1..13: note = Table B: HLA-DQA1*01:02-B1*06:02L
  source 1..13: note = Severe acute respiratory syndrome coronavirus 2
GYKSVNITFELDE

SEQ ID NO: 17639 - protein, 13 aa, Severe acute respiratory syndrome-related coronavirus
  REGION 1..13: note = Table B: HLA-DQA1*01:02-B1*06:02L HLA-DQA1*02:01-B1*03:03L
  source 1..13: note = Severe acute respiratory syndrome coronavirus 2
YKSVNITFELDER

SEQ ID NO: 17640 - protein, 12 aa, Severe acute respiratory syndrome-related coronavirus
  REGION 1..12: note = Table B: HLA-DQA1*01:02-B1*06:02L HLA-DRB1*12:01L HLA-DPA1*02:01-B1*13:01L
  source 1..12: note = Severe acute respiratory syndrome coronavirus 2
VNITFELDERID

SEQ ID NO: 17641 - protein, 12 aa, Severe acute respiratory syndrome-related coronavirus
  REGION 1..12: note = Table B: HLA-DQA1*01:02-B1*06:02L
  source 1..12: note = Severe acute respiratory syndrome coronavirus 2
LDERIDKVLNEK

SEQ ID NO: 17642 - protein, 10 aa, Severe acute respiratory syndrome-related coronavirus
  REGION 1..10: note = Table B: HLA-DQA1*01:02-B1*06:02L HLA-DQA1*05:05-B1*03:19L HLA-DQA1*02:01-B1*03:03L
  source 1..10: note = Severe acute respiratory syndrome coronavirus 2
KVLNEKCSAY

SEQ ID NO: 17643 - protein, 12 aa, Severe acute respiratory syndrome-related coronavirus
  REGION 1..12: note = Table B: HLA-DQA1*01:02-B1*06:02L
  source 1..12: note = Severe acute respiratory syndrome coronavirus 2
VLNEKCSAYTVE

SEQ ID NO: 17644 - protein, 12 aa, Severe acute respiratory syndrome-related coronavirus
  REGION 1..12: note = Table B: HLA-DQA1*01:02-B1*06:02L HLA-DQA1*01:03-B1*06:01L
  source 1..12: note = Severe acute respiratory syndrome coronavirus 2
NEKCSAYTVELG

SEQ ID NO: 17645 - protein, 13 aa, Severe acute respiratory syndrome-related coronavirus
  REGION 1..13: note = Table B: HLA-DQA1*01:02-B1*06:02L HLA-DPA1*03:01-B1*105:01L
  source 1..13: note = Severe acute respiratory syndrome coronavirus 2
TEVNEFACVVADA

SEQ ID NO: 17646 - protein, 13 aa, Severe acute respiratory syndrome-related coronavirus
  REGION 1..13: note = Table B: HLA-DQA1*01:02-B1*06:02L
  source 1..13: note = Severe acute respiratory syndrome coronavirus 2
EVNEFACVVADAV

SEQ ID NO: 17647 - protein, 13 aa, Severe acute respiratory syndrome-related coronavirus
  REGION 1..13: note = Table B: HLA-DQA1*01:02-B1*06:02L
  source 1..13: note = Severe acute respiratory syndrome coronavirus 2
VNEFACVVADAVI

SEQ ID NO: 17648 - protein, 12 aa, Severe acute respiratory syndrome-related coronavirus
  REGION 1..12: note = Table B: HLA-DQA1*01:02-B1*06:02L HLA-DQA1*03:01-B1*03:02L HLA-DQA1*01:03-B1*06:01L HLA-DQA1*02:01-B1*03:03L
  source 1..12: note = Severe acute respiratory syndrome coronavirus 2
VADAVIKTLQPV

SEQ ID NO: 17649 - protein, 14 aa, Severe acute respiratory syndrome-related coronavirus
  REGION 1..14: note = Table B: HLA-DQA1*01:02-B1*06:02L
  source 1..14: note = Severe acute respiratory syndrome coronavirus 2
PVSELLTPLGIDLD

SEQ ID NO: 17650 - protein, 14 aa, Severe acute respiratory syndrome-related coronavirus
  REGION 1..14: note = Table B: HLA-DQA1*01:02-B1*06:02L
  source 1..14: note = Severe acute respiratory syndrome coronavirus 2
LDEWSMATYYLFDE

SEQ ID NO: 17651 - protein, 14 aa, Severe acute respiratory syndrome-related coronavirus
  REGION 1..14: note = Table B: HLA-DQA1*01:02-B1*06:02L HLA-DPA1*03:01-B1*04:02L HLA-DPA1*03:01-B1*105:01L
  source 1..14: note = Severe acute respiratory syndrome coronavirus 2
DEWSMATYYLFDES

SEQ ID NO: 17652 - protein, 15 aa, Severe acute respiratory syndrome-related coronavirus
  REGION 1..15: note = Table B: HLA-DQA1*01:02-B1*06:02L HLA-DPA1*01:03-B1*04:02L
  source 1..15: note = Severe acute respiratory syndrome coronavirus 2
EFKLASHMYCSFYPP

SEQ ID NO: 17653 - protein, 15 aa, Severe acute respiratory syndrome-related coronavirus
  REGION 1..15: note = Table B: HLA-DQA1*01:02-B1*06:02L HLA-DPA1*01:03-B1*04:02L
  source 1..15: note = Severe acute respiratory syndrome coronavirus 2
FKLASHMYCSFYPPD

SEQ ID NO: 17654 - protein, 12 aa, Severe acute respiratory syndrome-related coronavirus
  REGION 1..12: note = Table B: HLA-DQA1*01:02-B1*06:02L
  source 1..12: note = Severe acute respiratory syndrome coronavirus 2
SHMYCSFYPPDE

SEQ ID NO: 17655 - protein, 14 aa, Severe acute respiratory syndrome-related coronavirus
  REGION 1..14: note = Table B: HLA-DQA1*01:02-B1*06:02L HLA-DQA1*05:05-B1*03:01L
  source 1..14: note = Severe acute respiratory syndrome coronavirus 2
FEPSTQYEYGTEDD

SEQ ID NO: 17656 - protein, 10 aa, Severe acute respiratory syndrome-related coronavirus
  REGION 1..10: note = Table B: HLA-DQA1*01:02-B1*06:02L
  source 1..10: note = Severe acute respiratory syndrome coronavirus 2
QPEEEQEEDW

SEQ ID NO: 17657 - protein, 14 aa, Severe acute respiratory syndrome-related coronavirus
  REGION 1..14: note = Table B: HLA-DQA1*01:02-B1*06:02L HLA-DPA1*01:03-B1*03:01L HLA-DRB1*03:01L HLA-DPA1*03:01-B1*105:01L HLA-DQA1*05:05-B1*03:01L
  source 1..14: note = Severe acute respiratory syndrome coronavirus 2
DWLDDDSQQTVGQQ

SEQ ID NO: 17658 - protein, 14 aa, Severe acute respiratory syndrome-related coronavirus
  REGION 1..14: note = Table B: HLA-DQA1*01:02-B1*06:02L HLA-DQA1*05:05-B1*03:19L
  source 1..14: note = Severe acute respiratory syndrome coronavirus 2
DDSQQTVGQQDGSE

SEQ ID NO: 17659 - protein, 12 aa, Severe acute respiratory syndrome-related coronavirus
  REGION 1..12: note = Table B: HLA-DQA1*01:02-B1*06:02L HLA-DQA1*05:05-B1*03:01L HLA-DQA1*02:01-B1*03:03L
  source 1..12: note = Severe acute respiratory syndrome coronavirus 2
EDNQTTTIQTIV

SEQ ID NO: 17660 - protein, 10 aa, Severe acute respiratory syndrome-related coronavirus
  REGION 1..10: note = Table B: HLA-DQA1*01:02-B1*06:02L HLA-DQA1*03:01-B1*03:02L HLA-DQA1*01:03-B1*06:01L HLA-DQA1*02:01-B1*03:03L
  source 1..10: note = Severe acute respiratory syndrome coronavirus 2
QTTTIQTIVE

SEQ ID NO: 17661 - protein, 12 aa, Severe acute respiratory syndrome-related coronavirus
  REGION 1..12: note = Table B: HLA-DQA1*01:02-B1*06:02L HLA-DQA1*01:03-B1*06:01L
  source 1..12: note = Severe acute respiratory syndrome coronavirus 2
TIQTIVEVQPQL

SEQ ID NO: 17662 - protein, 12 aa, Severe acute respiratory syndrome-related coronavirus
  REGION 1..12: note = Table B: HLA-DQA1*01:02-B1*06:02L HLA-DQA1*05:01-B1*02:01L HLA-DQA1*05:05-B1*03:01L
  source 1..12: note = Severe acute respiratory syndrome coronavirus 2
ELTPVVQTIEVN

SEQ ID NO: 17663 - protein, 10 aa, Severe acute respiratory syndrome-related coronavirus
  REGION 1..10: note = Table B: HLA-DQA1*01:02-B1*06:02L HLA-DRB1*14:02L HLA-DPA1*02:01-B1*13:01L HLA-DPA1*03:01-B1*105:01L HLA-DQA1*01:03-B1*06:01L HLA-DQA1*02:01-B1*03:03L HLA-DRB1*15:03L
  source 1..10: note = Severe acute respiratory syndrome coronavirus 2
VVQTIEVNSF

SEQ ID NO: 17664 - protein, 12 aa, Severe acute respiratory syndrome-related coronavirus
  REGION 1..12: note = Table B: HLA-DQA1*01:02-B1*06:02L HLA-DPA1*03:01-B1*105:01L HLA-DRB1*16:01L HLA-DRB1*15:03L
  source 1..12: note = Severe acute respiratory syndrome coronavirus 2
VNSFSGYLKLTD

SEQ ID NO: 17665 - protein, 12 aa, Severe acute respiratory syndrome-related coronavirus
  REGION 1..12: note = Table B: HLA-DQA1*01:02-B1*06:02L HLA-DQA1*01-B1*05L HLA-DQA1*05:05-B1*03:01L HLA-DQA1*01:03-B1*06:01L
  source 1..12: note = Severe acute respiratory syndrome coronavirus 2
YLKLTDNVYIKN

SEQ ID NO: 17666 - protein, 13 aa, Severe acute respiratory syndrome-related coronavirus
  REGION 1..13: note = Table B: HLA-DQA1*01:02-B1*06:02L HLA-DPA1*03:01-B1*105:01L HLA-DQA1*01:03-B1*06:01L
  source 1..13: note = Severe acute respiratory syndrome coronavirus 2
LKLTDNVYIKNAD

SEQ ID NO: 17667 - protein, 12 aa, Severe acute respiratory syndrome-related coronavirus
  REGION 1..12: note = Table B: HLA-DQA1*01:02-B1*06:02L HLA-DQA1*03:01-B1*03:02L HLA-DQA1*02:01-B1*03:03L
  source 1..12: note = Severe acute respiratory syndrome coronavirus 2
EAKKVKPTVVVN

SEQ ID NO: 17668 - protein, 12 aa, Severe acute respiratory syndrome-related coronavirus
  REGION 1..12: note = Table B: HLA-DQA1*01:02-B1*06:02L
  source 1..12: note = Severe acute respiratory syndrome coronavirus 2
VVVNAANVYLKH

SEQ ID NO: 17669 - protein, 12 aa, Severe acute respiratory syndrome-related coronavirus
  REGION 1..12: note = Table B: HLA-DQA1*01:02-B1*06:02L
  source 1..12: note = Severe acute respiratory syndrome coronavirus 2
VNAANVYLKHGG

SEQ ID NO: 17670 - protein, 13 aa, Severe acute respiratory syndrome-related coronavirus
  REGION 1..13: note = Table B: HLA-DQA1*01:02-B1*06:02L HLA-DPA1*03:01-B1*105:01L HLA-DQA1*01:03-B1*06:01L
  source 1..13: note = Severe acute respiratory syndrome coronavirus 2
VYLKHGGGVAGAL

SEQ ID NO: 17671 - protein, 12 aa, Severe acute respiratory syndrome-related coronavirus
  REGION 1..12: note = Table B: HLA-DQA1*01:02-B1*06:02L HLA-DQA1*03:01-B1*03:02L HLA-DQA1*01:03-B1*06:01L HLA-DQA1*02:01-B1*03:03L
  source 1..12: note = Severe acute respiratory syndrome coronavirus 2
LNKATNNAMQVE

SEQ ID NO: 17672 - protein, 16 aa, Severe acute respiratory syndrome-related coronavirus
  REGION 1..16: note = Table B: HLA-DQA1*01:02-B1*06:02L HLA-DQA1*01:03-B1*06:01L HLA-DQA1*02:01-B1*03:03L
  source 1..16: note = Severe acute respiratory syndrome coronavirus 2
AMQVESDDYIATNGPL

SEQ ID NO: 17673 - protein, 13 aa, Severe acute respiratory syndrome-related coronavirus
  REGION 1..13: note = Table B: HLA-DQA1*01:02-B1*06:02L HLA-DQA1*05:05-B1*03:01L HLA-DQA1*01:03-B1*06:01L
  source 1..13: note = Severe acute respiratory syndrome coronavirus 2
GPLKVGGSCVLSG

SEQ ID NO: 17674 - protein, 12 aa, Severe acute respiratory syndrome-related coronavirus
  REGION 1..12: note = Table B: HLA-DQA1*01:02-B1*06:02L
  source 1..12: note = Severe acute respiratory syndrome coronavirus 2
LAKHCLHVVGPN

SEQ ID NO: 17675 - protein, 12 aa, Severe acute respiratory syndrome-related coronavirus
  REGION 1..12: note = Table B: HLA-DQA1*01:02-B1*06:02L
  source 1..12: note = Severe acute respiratory syndrome coronavirus 2
HVVGPNVNKGED

SEQ ID NO: 17676 - protein, 13 aa, Severe acute respiratory syndrome-related coronavirus
  REGION 1..13: note = Table B: HLA-DQA1*01:02-B1*06:02L
  source 1..13: note = Severe acute respiratory syndrome coronavirus 2
GPNVNKGEDIQLL

SEQ ID NO: 17677 - protein, 11 aa, Severe acute respiratory syndrome-related coronavirus
  REGION 1..11: note = Table B: HLA-DQA1*01:02-B1*06:02L HLA-DPA1*03:01-B1*105:01L HLA-DQA1*03:01-B1*03:02L HLA-DQA1*02:01-B1*03:03L
  source 1..11: note = Severe acute respiratory syndrome coronavirus 2
VNKGEDIQLLK

SEQ ID NO: 17678 - protein, 10 aa, Severe acute respiratory syndrome-related coronavirus
  REGION 1..10: note = Table B: HLA-DQA1*01:02-B1*06:02L HLA-DQA1*01:03-B1*06:01L HLA-DQA1*02:01-B1*03:03L
  source 1..10: note = Severe acute respiratory syndrome coronavirus 2
QLLKSAYENF

SEQ ID NO: 17679 - protein, 12 aa, Severe acute respiratory syndrome-related coronavirus
  REGION 1..12: note = Table B: HLA-DQA1*01:02-B1*06:02L HLA-DRB1*01:02L HLA-DPA1*03:01-B1*04:02L HLA-DPA1*01:03-B1*04:02L HLA-DRB1*16:01L HLA-DRB1*04:08L HLA-DRB1*15:03L
  source 1..12: note = Severe acute respiratory syndrome coronavirus 2
LLKSAYENFNQH

SEQ ID NO: 17680 - protein, 12 aa, Severe acute respiratory syndrome-related coronavirus
  REGION 1..12: note = Table B: HLA-DQA1*01:02-B1*06:02L
  source 1..12: note = Severe acute respiratory syndrome coronavirus 2
LKSAYENFNQHE

SEQ ID NO: 17681 - protein, 12 aa, Severe acute respiratory syndrome-related coronavirus
  REGION 1..12: note = Table B: HLA-DQA1*01:02-B1*06:02L HLA-DPA1*03:01-B1*105:01L HLA-DQA1*01:03-B1*06:01L
  source 1..12: note = Severe acute respiratory syndrome coronavirus 2
FNQHEVLLAPLL

SEQ ID NO: 17682 - protein, 12 aa, Severe acute respiratory syndrome-related coronavirus
  REGION 1..12: note = Table B: HLA-DQA1*01:02-B1*06:02L HLA-DQA1*01:03-B1*06:01L
  source 1..12: note = Severe acute respiratory syndrome coronavirus 2
NQHEVLLAPLLS

SEQ ID NO: 17683 - protein, 12 aa, Severe acute respiratory syndrome-related coronavirus
  REGION 1..12: note = Table B: HLA-DQA1*01:02-B1*06:02L
  source 1..12: note = Severe acute respiratory syndrome coronavirus 2
HEVLLAPLLSAG

SEQ ID NO: 17684 - protein, 14 aa, Severe acute respiratory syndrome-related coronavirus
  REGION 1..14: note = Table B: HLA-DQA1*01:02-B1*06:02L HLA-DRB1*12:01L HLA-DPA1*03:01-B1*105:01L
  source 1..14: note = Severe acute respiratory syndrome coronavirus 2
EVLLAPLLSAGIFG

SEQ ID NO: 17685 - protein, 13 aa, Severe acute respiratory syndrome-related coronavirus
  REGION 1..13: note = Table B: HLA-DQA1*01:02-B1*06:02L HLA-DQA1*01:03-B1*06:01L
  source 1..13: note = Severe acute respiratory syndrome coronavirus 2
LAPLLSAGIFGAD

SEQ ID NO: 17686 - protein, 12 aa, Severe acute respiratory syndrome-related coronavirus
  REGION 1..12: note = Table B: HLA-DQA1*01:02-B1*06:02L HLA-DQA1*01:01-B1*05:01L
  source 1..12: note = Severe acute respiratory syndrome coronavirus 2
SAGIFGADPIHS

SEQ ID NO: 17687 - protein, 12 aa, Severe acute respiratory syndrome-related coronavirus
  REGION 1..12: note = Table B: HLA-DQA1*01:02-B1*06:02L
  source 1..12: note = Severe acute respiratory syndrome coronavirus 2
DPIHSLRVCVDT

SEQ ID NO: 17688 - protein, 11 aa, Severe acute respiratory syndrome-related coronavirus
  REGION 1..11: note = Table B: HLA-DQA1*01:02-B1*06:02L HLA-DPA1*01:03-B1*03:01L HLA-DRB1*03:01L HLA-DQA1*05:01-B1*02:01L HLA-DPA1*01:03-B1*104:01L HLA-DRB1*16:01L HLA-DQA1*02:01-B1*03:03L
  source 1..11: note = Severe acute respiratory syndrome coronavirus 2
VCVDTVRTNVY

SEQ ID NO: 17689 - protein, 13 aa, Severe acute respiratory syndrome-related coronavirus
  REGION 1..13: note = Table B: HLA-DQA1*01:02-B1*06:02L HLA-DPA1*03:01-B1*105:01L HLA-DQA1*01:03-B1*06:01L HLA-DRB1*15:03L
  source 1..13: note = Severe acute respiratory syndrome coronavirus 2
VDTVRTNVYLAVF

SEQ ID NO: 17690 - protein, 12 aa, Severe acute respiratory syndrome-related coronavirus
  REGION 1..12: note = Table B: HLA-DQA1*01:02-B1*06:02L HLA-DPA1*03:01-B1*105:01L HLA-DPA1*01:02-B1*04:01L
  source 1..12: note = Severe acute respiratory syndrome coronavirus 2
VRTNVYLAVFDK

SEQ ID NO: 17691 - protein, 12 aa, Severe acute respiratory syndrome-related coronavirus
  REGION 1..12: note = Table B: HLA-DQA1*01:02-B1*06:02L
  source 1..12: note = Severe acute respiratory syndrome coronavirus 2
KLVSSFLEMKSE

SEQ ID NO: 17692 - protein, 12 aa, Severe acute respiratory syndrome-related coronavirus
  REGION 1..12: note = Table B: HLA-DQA1*01:02-B1*06:02L HLA-DPA1*01:03-B1*04:01L HLA-DPA1*01:03-B1*04:02L HLA-DQA1*02:01-B1*03:03L
  source 1..12: note = Severe acute respiratory syndrome coronavirus 2
LVSSFLEMKSEK

SEQ ID NO: 17693 - protein, 14 aa, Severe acute respiratory syndrome-related coronavirus
  REGION 1..14: note = Table B: HLA-DQA1*01:02-B1*06:02L
  source 1..14: note = Severe acute respiratory syndrome coronavirus 2
EMKSEKQVEQKIAE

SEQ ID NO: 17694 - protein, 14 aa, Severe acute respiratory syndrome-related coronavirus
  REGION 1..14: note = Table B: HLA-DQA1*01:02-B1*06:02L HLA-DRB1*01:02L HLA-DRB1*12:01L HLA-DPA1*02:01-B1*13:01L HLA-DRB1*16:01L HLA-DRB1*04:08L
  source 1..14: note = Severe acute respiratory syndrome coronavirus 2
SEKQVEQKIAEIPK

SEQ ID NO: 17695 - protein, 14 aa, Severe acute respiratory syndrome-related coronavirus
  REGION 1..14: note = Table B: HLA-DQA1*01:02-B1*06:02L HLA-DRB1*01:02L HLA-DRB1*16:01L HLA-DRB1*04:08L
  source 1..14: note = Severe acute respiratory syndrome coronavirus 2
EKQVEQKIAEIPKE

SEQ ID NO: 17696 - protein, 12 aa, Severe acute respiratory syndrome-related coronavirus
  REGION 1..12: note = Table B: HLA-DQA1*01:02-B1*06:02L HLA-DQA1*01:03-B1*06:01L
  source 1..12: note = Severe acute respiratory syndrome coronavirus 2
EVKPFITESKPS

SEQ ID NO: 17697 - protein, 12 aa, Severe acute respiratory syndrome-related coronavirus
  REGION 1..12: note = Table B: HLA-DQA1*01:02-B1*06:02L HLA-DRB1*04:08L
  source 1..12: note = Severe acute respiratory syndrome coronavirus 2
FITESKPSVEQR

SEQ ID NO: 17698 - protein, 14 aa, Severe acute respiratory syndrome-related coronavirus
  REGION 1..14: note = Table B: HLA-DQA1*01:02-B1*06:02L
  source 1..14: note = Severe acute respiratory syndrome coronavirus 2
ITESKPSVEQRKQD

SEQ ID NO: 17699 - protein, 14 aa, Severe acute respiratory syndrome-related coronavirus
  REGION 1..14: note = Table B: HLA-DQA1*01:02-B1*06:02L HLA-DRB1*01:02L HLA-DQA1*02:01-B1*03:03L
  source 1..14: note = Severe acute respiratory syndrome coronavirus 2
ESKPSVEQRKQDDK

SEQ ID NO: 17700 - protein, 12 aa, Severe acute respiratory syndrome-related coronavirus
  REGION 1..12: note = Table B: HLA-DQA1*01:02-B1*06:02L
  source 1..12: note = Severe acute respiratory syndrome coronavirus 2
KKIKACVEEVTT

SEQ ID NO: 17701 - protein, 12 aa, Severe acute respiratory syndrome-related coronavirus
  REGION 1..12: note = Table B: HLA-DQA1*01:02-B1*06:02L
  source 1..12: note = Severe acute respiratory syndrome coronavirus 2
KIKACVEEVTTT

SEQ ID NO: 17702 - protein, 12 aa, Severe acute respiratory syndrome-related coronavirus
  REGION 1..12: note = Table B: HLA-DQA1*01:02-B1*06:02L
  source 1..12: note = Severe acute respiratory syndrome coronavirus 2
IKACVEEVTTTL

SEQ ID NO: 17703 - protein, 12 aa, Severe acute respiratory syndrome-related coronavirus
  REGION 1..12: note = Table B: HLA-DQA1*01:02-B1*06:02L HLA-DRB1*08:04L HLA-DPA1*01:03-B1*03:01L HLA-DPA1*03:01-B1*04:02L HLA-DRB1*14:02L HLA-DRB1*08:01L HLA-DPA1*01:03-B1*04:02L HLA-DRB3*01:01L HLA-DQA1*01:03-B1*06:01L
  source 1..12: note = Severe acute respiratory syndrome coronavirus 2
LYIDINGNLHPD

SEQ ID NO: 17704 - protein, 13 aa, Severe acute respiratory syndrome-related coronavirus
  REGION 1..13: note = Table B: HLA-DQA1*01:02-B1*06:02L HLA-DQA1*02:01-B1*03:03L
  source 1..13: note = Severe acute respiratory syndrome coronavirus 2
PDSATLVSDIDIT

SEQ ID NO: 17705 - protein, 12 aa, Severe acute respiratory syndrome-related coronavirus
  REGION 1..12: note = Table B: HLA-DQA1*01:02-B1*06:02L HLA-DQA1*03:01-B1*03:02L HLA-DPA1*01:02-B1*04:01L HLA-DQA1*01:03-B1*06:01L HLA-DQA1*02:01-B1*03:03L
  source 1..12: note = Severe acute respiratory syndrome coronavirus 2
DIDITFLKKDAP

SEQ ID NO: 17706 - protein, 14 aa, Severe acute respiratory syndrome-related coronavirus
  REGION 1..14: note = Table B: HLA-DQA1*01:02-B1*06:02L
  source 1..14: note = Severe acute respiratory syndrome coronavirus 2
FLKKDAPYIVGDVV

SEQ ID NO: 17707 - protein, 14 aa, Severe acute respiratory syndrome-related coronavirus
  REGION 1..14: note = Table B: HLA-DQA1*01:02-B1*06:02L HLA-DPA1*02:01-B1*13:01L HLA-DQA1*01:03-B1*06:01L HLA-DQA1*02:01-B1*03:03L
  source 1..14: note = Severe acute respiratory syndrome coronavirus 2
LKKDAPYIVGDVVQ

SEQ ID NO: 17708 - protein, 13 aa, Severe acute respiratory syndrome-related coronavirus
  REGION 1..13: note = Table B: HLA-DQA1*01:02-B1*06:02L HLA-DRB1*08:04L HLA-DPA1*01:03-B1*03:01L HLA-DPA1*03:01-B1*04:02L HLA-DRB1*14:01L HLA-DRB1*14:02L HLA-DQA1*05:05-B1*03:19L HLA-DQA1*05:05-B1*03:01L HLA-DRB1*15:03L
  source 1..13: note = Severe acute respiratory syndrome coronavirus 2
APYIVGDVVQEGV

SEQ ID NO: 17709 - protein, 12 aa, Severe acute respiratory syndrome-related coronavirus
  REGION 1..12: note = Table B: HLA-DQA1*01:02-B1*06:02L
  source 1..12: note = Severe acute respiratory syndrome coronavirus 2
KAGGTTEMLAKA

SEQ ID NO: 17710 - protein, 12 aa, Severe acute respiratory syndrome-related coronavirus
  REGION 1..12: note = Table B: HLA-DQA1*01:02-B1*06:02L
  source 1..12: note = Severe acute respiratory syndrome coronavirus 2
LAKALRKVPTDN

SEQ ID NO: 17711 - protein, 12 aa, Severe acute respiratory syndrome-related coronavirus
  REGION 1..12: note = Table B: HLA-DQA1*01:02-B1*06:02L
  source 1..12: note = Severe acute respiratory syndrome coronavirus 2
QGLNGYTVEEAK

SEQ ID NO: 17712 - protein, 14 aa, Severe acute respiratory syndrome-related coronavirus
  REGION 1..14: note = Table B: HLA-DQA1*01:02-B1*06:02L
  source 1..14: note = Severe acute respiratory syndrome coronavirus 2
TVEEAKTVLKKCKS

SEQ ID NO: 17713 - protein, 14 aa, Severe acute respiratory syndrome-related coronavirus
  REGION 1..14: note = Table B: HLA-DQA1*01:02-B1*06:02L
  source 1..14: note = Severe acute respiratory syndrome coronavirus 2
VEEAKTVLKKCKSA

SEQ ID NO: 17714 - protein, 14 aa, Severe acute respiratory syndrome-related coronavirus
  REGION 1..14: note = Table B: HLA-DQA1*01:02-B1*06:02L HLA-DRB1*01:02L HLA-DRB1*15:03L
  source 1..14: note = Severe acute respiratory syndrome coronavirus 2
VLKKCKSAFYILPS

SEQ ID NO: 17715 - protein, 13 aa, Severe acute respiratory syndrome-related coronavirus
  REGION 1..13: note = Table B: HLA-DQA1*01:02-B1*06:02L HLA-DQA1*01:03-B1*06:01L HLA-DQA1*02:01-B1*03:03L
  source 1..13: note = Severe acute respiratory syndrome coronavirus 2
ISNEKQEILGTVS

SEQ ID NO: 17716 - protein, 14 aa, Severe acute respiratory syndrome-related coronavirus
  REGION 1..14: note = Table B: HLA-DQA1*01:02-B1*06:02L
  source 1..14: note = Severe acute respiratory syndrome coronavirus 2
TVSWNLREMLAHAE

SEQ ID NO: 17717 - protein, 12 aa, Severe acute respiratory syndrome-related coronavirus
  REGION 1..12: note = Table B: HLA-DQA1*01:02-B1*06:02L
  source 1..12: note = Severe acute respiratory syndrome coronavirus 2
WNLREMLAHAEE

SEQ ID NO: 17718 - protein, 14 aa, Severe acute respiratory syndrome-related coronavirus
  REGION 1..14: note = Table B: HLA-DQA1*01:02-B1*06:02L HLA-DRB1*01:02L
  source 1..14: note = Severe acute respiratory syndrome coronavirus 2
MLAHAEETRKLMPV

SEQ ID NO: 17719 - protein, 14 aa, Severe acute respiratory syndrome-related coronavirus
  REGION 1..14: note = Table B: HLA-DQA1*01:02-B1*06:02L
  source 1..14: note = Severe acute respiratory syndrome coronavirus 2
HAEETRKLMPVCVE

SEQ ID NO: 17720 - protein, 14 aa, Severe acute respiratory syndrome-related coronavirus
  REGION 1..14: note = Table B: HLA-DQA1*01:02-B1*06:02L HLA-DRB1*01:02L
  source 1..14: note = Severe acute respiratory syndrome coronavirus 2
AEETRKLMPVCVET

SEQ ID NO: 17721 - protein, 14 aa, Severe acute respiratory syndrome-related coronavirus
  REGION 1..14: note = Table B: HLA-DQA1*01:02-B1*06:02L HLA-DPA1*01:03-B1*03:01L HLA-DRB1*08:01L HLA-DRB1*11:01L HLA-DPA1*01:03-B1*104:01L HLA-DPA1*01:02-B1*04:01L HLA-DRB1*04:08L HLA-DQA1*02:01-B1*03:03L HLA-DRB1*15:03L
  source 1..14: note = Severe acute respiratory syndrome coronavirus 2
EETRKLMPVCVETK

SEQ ID NO: 17722 - protein, 14 aa, Severe acute respiratory syndrome-related coronavirus
  REGION 1..14: note = Table B: HLA-DQA1*01:02-B1*06:02L HLA-DPA1*01:03-B1*03:01L HLA-DRB1*04:08L HLA-DQA1*02:01-B1*03:03L HLA-DRB1*15:03L
  source 1..14: note = Severe acute respiratory syndrome coronavirus 2
ETRKLMPVCVETKA

SEQ ID NO: 17723 - protein, 14 aa, Severe acute respiratory syndrome-related coronavirus
  REGION 1..14: note = Table B: HLA-DQA1*01:02-B1*06:02L
  source 1..14: note = Severe acute respiratory syndrome coronavirus 2
KLMPVCVETKAIVS

SEQ ID NO: 17724 - protein, 14 aa, Severe acute respiratory syndrome-related coronavirus
  REGION 1..14: note = Table B: HLA-DQA1*01:02-B1*06:02L
  source 1..14: note = Severe acute respiratory syndrome coronavirus 2
LMPVCVETKAIVST

SEQ ID NO: 17725 - protein, 11 aa, Severe acute respiratory syndrome-related coronavirus
  REGION 1..11: note = Table B: HLA-DQA1*01:02-B1*06:02L HLA-DRB1*14:01L
  source 1..11: note = Severe acute respiratory syndrome coronavirus 2
IVSTIQRKYKG

SEQ ID NO: 17726 - protein, 11 aa, Severe acute respiratory syndrome-related coronavirus
  REGION 1..11: note = Table B: HLA-DQA1*01:02-B1*06:02L HLA-DQA1*01:03-B1*06:01L
  source 1..11: note = Severe acute respiratory syndrome coronavirus 2
YKGIKIQEGVV

SEQ ID NO: 17727 - protein, 10 aa, Severe acute respiratory syndrome-related coronavirus
  REGION 1..10: note = Table B: HLA-DQA1*01:02-B1*06:02L HLA-DPA1*01:03-B1*03:01L HLA-DRB1*03:01L HLA-DRB1*11:02L HLA-DQA1*01-B1*05L HLA-DQA1*05:05-B1*03:19M HLA-DQA1*05:01-B1*02:01L HLA-DRB4*01:01L HLA-DPA1*01:03-B1*04:01L
  REGION 1..10: note = CONT. FROM ABOVE: HLA-DPA1*01:03-B1*104:01L HLA-DRB1*16:01L
  source 1..10: note = Severe acute respiratory syndrome coronavirus 2
VDYGARFYFY

SEQ ID NO: 17728 - protein, 14 aa, Severe acute respiratory syndrome-related coronavirus
  REGION 1..14: note = Table B: HLA-DQA1*01:02-B1*06:02L
  source 1..14: note = Severe acute respiratory syndrome coronavirus 2
DYGARFYFYTSKTT

SEQ ID NO: 17729 - protein, 12 aa, Severe acute respiratory syndrome-related coronavirus
  REGION 1..12: note = Table B: HLA-DQA1*01:02-B1*06:02L HLA-DQA1*05:05-B1*03:01L HLA-DQA1*02:01-B1*03:03L
  source 1..12: note = Severe acute respiratory syndrome coronavirus 2
TVASLINTLNDL

SEQ ID NO: 17730 - protein, 12 aa, Severe acute respiratory syndrome-related coronavirus
  REGION 1..12: note = Table B: HLA-DQA1*01:02-B1*06:02L HLA-DRB1*01:02L HLA-DRB1*14:01L HLA-DRB1*11:04L HLA-DPA1*03:01-B1*105:01L HLA-DRB1*10:01L HLA-DRB1*08:03L HLA-DRB1*15:03L
  source 1..12: note = Severe acute respiratory syndrome coronavirus 2
SLINTLNDLNET

SEQ ID NO: 17731 - protein, 14 aa, Severe acute respiratory syndrome-related coronavirus
  REGION 1..14: note = Table B: HLA-DQA1*01:02-B1*06:02L HLA-DPA1*03:01-B1*105:01L
  source 1..14: note = Severe acute respiratory syndrome coronavirus 2
LNDLNETLVTMPLG

SEQ ID NO: 17732 - protein, 11 aa, Severe acute respiratory syndrome-related coronavirus
  REGION 1..11: note = Table B: HLA-DQA1*01:02-B1*06:02L
  source 1..11: note = Severe acute respiratory syndrome coronavirus 2
LVTMPLGYVTH

SEQ ID NO: 17733 - protein, 12 aa, Severe acute respiratory syndrome-related coronavirus
  REGION 1..12: note = Table B: HLA-DQA1*01:02-B1*06:02L
  source 1..12: note = Severe acute respiratory syndrome coronavirus 2
GYVTHGLNLEEA

SEQ ID NO: 17734 - protein, 10 aa, Severe acute respiratory syndrome-related coronavirus
  REGION 1..10: note = Table B: HLA-DQA1*01:02-B1*06:02L HLA-DPA1*01:03-B1*03:01L HLA-DQA1*05:05-B1*03:19L HLA-DQA1*05:01-B1*02:01L HLA-DPA1*01:03-B1*104:01L HLA-DRB1*16:01L
  source 1..10: note = Severe acute respiratory syndrome coronavirus 2
PDAVTAYNGY

SEQ ID NO: 17735 - protein, 14 aa, Severe acute respiratory syndrome-related coronavirus
  REGION 1..14: note = Table B: HLA-DQA1*01:02-B1*06:02L HLA-DRB1*12:01L
  source 1..14: note = Severe acute respiratory syndrome coronavirus 2
DAVTAYNGYLTSSS

SEQ ID NO: 17736 - protein, 12 aa, Severe acute respiratory syndrome-related coronavirus
  REGION 1..12: note = Table B: HLA-DQA1*01:02-B1*06:02L HLA-DRB3*02:01L HLA-DQA1*01:01-B1*05:01L HLA-DRB5*01:01L HLA-DQA1*05:05-B1*03:19L HLA-DRB1*09:01L HLA-DPA1*03:01-B1*105:01L HLA-DQA1*01:03-B1*06:01L
  source 1..12: note = Severe acute respiratory syndrome coronavirus 2
NGYLTSSSKTPE

SEQ ID NO: 17737 - protein, 11 aa, Severe acute respiratory syndrome-related coronavirus
  REGION 1..11: note = Table B: HLA-DQA1*01:02-B1*06:02L HLA-DRB3*02:01L HLA-DRB1*08:01L HLA-DQA1*05:05-B1*03:19L HLA-DPA1*03:01-B1*105:01L HLA-DQA1*01:03-B1*06:01L
  source 1..11: note = Severe acute respiratory syndrome coronavirus 2
YLTSSSKTPEE

SEQ ID NO: 17738 - protein, 14 aa, Severe acute respiratory syndrome-related coronavirus
  REGION 1..14: note = Table B: HLA-DQA1*01:02-B1*06:02L HLA-DQA1*01:03-B1*06:01L
  source 1..14: note = Severe acute respiratory syndrome coronavirus 2
SSKTPEEHFIETIS

SEQ ID NO: 17739 - protein, 11 aa, Severe acute respiratory syndrome-related coronavirus
  REGION 1..11: note = Table B: HLA-DQA1*01:02-B1*06:02L HLA-DPA1*01:03-B1*03:01L HLA-DQA1*05:01-B1*02:01L HLA-DPA1*01:03-B1*104:01L HLA-DRB1*16:01L
  source 1..11: note = Severe acute respiratory syndrome coronavirus 2
FIETISLAGSY

SEQ ID NO: 17740 - protein, 10 aa, Severe acute respiratory syndrome-related coronavirus
  REGION 1..10: note = Table B: HLA-DQA1*01:02-B1*06:02L HLA-DQA1*05:05-B1*03:19L HLA-DQA1*01:03-B1*06:01L HLA-DQA1*02:01-B1*03:03L HLA-DRB1*15:03L
  source 1..10: note = Severe acute respiratory syndrome coronavirus 2
ISLAGSYKDW

SEQ ID NO: 17741 - protein, 11 aa, Severe acute respiratory syndrome-related coronavirus
  REGION 1..11: note = Table B: HLA-DQA1*01:02-B1*06:02L HLA-DQA1*01-B1*05L HLA-DQA1*02:01-B1*03:03L
  source 1..11: note = Severe acute respiratory syndrome coronavirus 2
SLAGSYKDWSY

SEQ ID NO: 17742 - protein, 12 aa, Severe acute respiratory syndrome-related coronavirus
  REGION 1..12: note = Table B: HLA-DQA1*01:02-B1*06:02L
  source 1..12: note = Severe acute respiratory syndrome coronavirus 2
STQLGIEFLKRG

SEQ ID NO: 17743 - protein, 12 aa, Severe acute respiratory syndrome-related coronavirus
  REGION 1..12: note = Table B: HLA-DQA1*01:02-B1*06:02L HLA-DRB1*08:01L HLA-DRB1*04:08L
  source 1..12: note = Severe acute respiratory syndrome coronavirus 2
QLGIEFLKRGDK

SEQ ID NO: 17744 - protein, 14 aa, Severe acute respiratory syndrome-related coronavirus
  REGION 1..14: note = Table B: HLA-DQA1*01:02-B1*06:02L HLA-DQA1*02:01-B1*03:03L
  source 1..14: note = Severe acute respiratory syndrome coronavirus 2
TSNPTTFHLDGEVI

SEQ ID NO: 17745 - protein, 12 aa, Severe acute respiratory syndrome-related coronavirus
  REGION 1..12: note = Table B: HLA-DQA1*01:02-B1*06:02L HLA-DRB1*01:02L HLA-DRB1*15:03L
  source 1..12: note = Severe acute respiratory syndrome coronavirus 2
TLLSLREVRTIK

SEQ ID NO: 17746 - protein, 11 aa, Severe acute respiratory syndrome-related coronavirus
  REGION 1..11: note = Table B: HLA-DQA1*01:02-B1*06:02L
  source 1..11: note = Severe acute respiratory syndrome coronavirus 2
SLREVRTIKVF

SEQ ID NO: 17747 - protein, 13 aa, Severe acute respiratory syndrome-related coronavirus
  REGION 1..13: note = Table B: HLA-DQA1*01:02-B1*06:02L
  source 1..13: note = Severe acute respiratory syndrome coronavirus 2
LREVRTIKVFTTV

SEQ ID NO: 17748 - protein, 11 aa, Severe acute respiratory syndrome-related coronavirus
  REGION 1..11: note = Table B: HLA-DQA1*01:02-B1*06:02L HLA-DQA1*01:03-B1*06:01L
  source 1..11: note = Severe acute respiratory syndrome coronavirus 2
VRTIKVFTTVD

SEQ ID NO: 17749 - protein, 14 aa, Severe acute respiratory syndrome-related coronavirus
  REGION 1..14: note = Table B: HLA-DQA1*01:02-B1*06:02L HLA-DPA1*03:01-B1*105:01L HLA-DQA1*05:05-B1*03:01L HLA-DQA1*01:03-B1*06:01L HLA-DQA1*02:01-B1*03:03L
  source 1..14: note = Severe acute respiratory syndrome coronavirus 2
YGQQFGPTYLDGAD

SEQ ID NO: 17750 - protein, 13 aa, Severe acute respiratory syndrome-related coronavirus
  REGION 1..13: note = Table B: HLA-DQA1*01:02-B1*06:02L HLA-DPA1*01:03-B1*03:01L HLA-DPA1*03:01-B1*105:01L HLA-DQA1*01:03-B1*06:01L HLA-DRB1*15:03L
  source 1..13: note = Severe acute respiratory syndrome coronavirus 2
FGPTYLDGADVTK

SEQ ID NO: 17751 - protein, 12 aa, Severe acute respiratory syndrome-related coronavirus
  REGION 1..12: note = Table B: HLA-DQA1*01:02-B1*06:02L
  source 1..12: note = Severe acute respiratory syndrome coronavirus 2
DVTKIKPHNSHE

SEQ ID NO: 17752 - protein, 13 aa, Severe acute respiratory syndrome-related coronavirus
  REGION 1..13: note = Table B: HLA-DQA1*01:02-B1*06:02L
  source 1..13: note = Severe acute respiratory syndrome coronavirus 2
TKIKPHNSHEGKT

SEQ ID NO: 17753 - protein, 15 aa, Severe acute respiratory syndrome-related coronavirus
  REGION 1..15: note = Table B: HLA-DQA1*01:02-B1*06:02L
  source 1..15: note = Severe acute respiratory syndrome coronavirus 2
PHNSHEGKTFYVLPN

SEQ ID NO: 17754 - protein, 13 aa, Severe acute respiratory syndrome-related coronavirus
  REGION 1..13: note = Table B: HLA-DQA1*01:02-B1*06:02L HLA-DQA1*01:03-B1*06:01L
  source 1..13: note = Severe acute respiratory syndrome coronavirus 2
HEGKTFYVLPNDD

SEQ ID NO: 17755 - protein, 11 aa, Severe acute respiratory syndrome-related coronavirus
  REGION 1..11: note = Table B: HLA-DQA1*01:02-B1*06:02L HLA-DRB1*01:02L HLA-DPA1*03:01-B1*04:02L HLA-DRB1*11:02L HLA-DRB1*14:02L HLA-DQA1*05:01-B1*02:01L HLA-DRB1*09:01L HLA-DPA1*01:03-B1*104:01L HLA-DPA1*01:02-B1*04:01L
  REGION 1..11: note = CONT. FROM ABOVE: HLA-DRB1*10:01L HLA-DRB1*08:03L
  source 1..11: note = Severe acute respiratory syndrome coronavirus 2
YVLPNDDTLRV

SEQ ID NO: 17756 - protein, 13 aa, Severe acute respiratory syndrome-related coronavirus
  REGION 1..13: note = Table B: HLA-DQA1*01:02-B1*06:02L HLA-DPA1*03:01-B1*105:01L
  source 1..13: note = Severe acute respiratory syndrome coronavirus 2
VLPNDDTLRVEAF

SEQ ID NO: 17757 - protein, 10 aa, Severe acute respiratory syndrome-related coronavirus
  REGION 1..10: note = Table B: HLA-DQA1*01:02-B1*06:02L HLA-DPA1*01:03-B1*03:01L HLA-DPA1*03:01-B1*04:02L HLA-DQA1*05:05-B1*03:19L HLA-DQA1*05:01-B1*02:01L HLA-DPA1*01:03-B1*04:01L HLA-DPA1*03:01-B1*105:01L HLA-DPA1*01:02-B1*04:01L
  REGION 1..10: note = CONT. FROM ABOVE: HLA-DRB1*16:01L
  source 1..10: note = Severe acute respiratory syndrome coronavirus 2
TLRVEAFEYY

SEQ ID NO: 17758 - protein, 14 aa, Severe acute respiratory syndrome-related coronavirus
  REGION 1..14: note = Table B: HLA-DQA1*01:02-B1*06:02L HLA-DQA1*01:03-B1*06:01L HLA-DRB1*15:03L
  source 1..14: note = Severe acute respiratory syndrome coronavirus 2
LRVEAFEYYHTTDP

SEQ ID NO: 17759 - protein, 13 aa, Severe acute respiratory syndrome-related coronavirus
  REGION 1..13: note = Table B: HLA-DQA1*01:02-B1*06:02L HLA-DPA1*03:01-B1*04:02L HLA-DPA1*01:03-B1*04:01L HLA-DPA1*01:03-B1*04:02L HLA-DPA1*03:01-B1*105:01L HLA-DPA1*01:02-B1*04:01L HLA-DQA1*01:03-B1*06:01L
  source 1..13: note = Severe acute respiratory syndrome coronavirus 2
DPSFLGRYMSALN

SEQ ID NO: 17760 - protein, 11 aa, Severe acute respiratory syndrome-related coronavirus
  REGION 1..11: note = Table B: HLA-DQA1*01:02-B1*06:02L
  source 1..11: note = Severe acute respiratory syndrome coronavirus 2
YMSALNHTKKW

SEQ ID NO: 17761 - protein, 15 aa, Severe acute respiratory syndrome-related coronavirus
  REGION 1..15: note = Table B: HLA-DQA1*01:02-B1*06:02L
  source 1..15: note = Severe acute respiratory syndrome coronavirus 2
NHTKKWKYPQVNGLT

SEQ ID NO: 17762 - protein, 10 aa, Severe acute respiratory syndrome-related coronavirus
  REGION 1..10: note = Table B: HLA-DQA1*01:02-B1*06:02L HLA-DQA1*03:01-B1*03:02L HLA-DQA1*01:03-B1*06:01L HLA-DQA1*02:01-B1*03:03L
  source 1..10: note = Severe acute respiratory syndrome coronavirus 2
GLTSIKWADN

SEQ ID NO: 17763 - protein, 10 aa, Severe acute respiratory syndrome-related coronavirus
  REGION 1..10: note = Table B: HLA-DQA1*01:02-B1*06:02L HLA-DQA1*05:05-B1*03:19L HLA-DQA1*05:01-B1*02:01L
  source 1..10: note = Severe acute respiratory syndrome coronavirus 2
SIKWADNNCY

SEQ ID NO: 17764 - protein, 13 aa, Severe acute respiratory syndrome-related coronavirus
  REGION 1..13: note = Table B: HLA-DQA1*01:02-B1*06:02L
  source 1..13: note = Severe acute respiratory syndrome coronavirus 2
KWADNNCYLATAL

SEQ ID NO: 17765 - protein, 14 aa, Severe acute respiratory syndrome-related coronavirus
  REGION 1..14: note = Table B: HLA-DQA1*01:02-B1*06:02L
  source 1..14: note = Severe acute respiratory syndrome coronavirus 2
WADNNCYLATALLT

SEQ ID NO: 17766 - protein, 14 aa, Severe acute respiratory syndrome-related coronavirus
  REGION 1..14: note = Table B: HLA-DQA1*01:02-B1*06:02L HLA-DPA1*01:03-B1*04:02L
  source 1..14: note = Severe acute respiratory syndrome coronavirus 2
DNNCYLATALLTLQ

SEQ ID NO: 17767 - protein, 10 aa, Severe acute respiratory syndrome-related coronavirus
  REGION 1..10: note = Table B: HLA-DQA1*01:02-B1*06:02L HLA-DPA1*03:01-B1*105:01L HLA-DQA1*01:03-B1*06:01L
  source 1..10: note = Severe acute respiratory syndrome coronavirus 2
LATALLTLQQ

SEQ ID NO: 17768 - protein, 10 aa, Severe acute respiratory syndrome-related coronavirus
  REGION 1..10: note = Table B: HLA-DQA1*01:02-B1*06:02L HLA-DQA1*05:05-B1*03:19L HLA-DQA1*01:03-B1*06:01L HLA-DQA1*02:01-B1*03:03L
  source 1..10: note = Severe acute respiratory syndrome coronavirus 2
LTLQQIELKF

SEQ ID NO: 17769 - protein, 12 aa, Severe acute respiratory syndrome-related coronavirus
  REGION 1..12: note = Table B: HLA-DQA1*01:02-B1*06:02L
  source 1..12: note = Severe acute respiratory syndrome coronavirus 2
TLQQIELKFNPP

SEQ ID NO: 17770 - protein, 12 aa, Severe acute respiratory syndrome-related coronavirus
  REGION 1..12: note = Table B: HLA-DQA1*01:02-B1*06:02L
  source 1..12: note = Severe acute respiratory syndrome coronavirus 2
QDAYYRARAGEA

SEQ ID NO: 17771 - protein, 14 aa, Severe acute respiratory syndrome-related coronavirus
  REGION 1..14: note = Table B: HLA-DQA1*01:02-B1*06:02L HLA-DPA1*01:03-B1*03:01L HLA-DPA1*02:01-B1*13:01L HLA-DPA1*03:01-B1*105:01L
  source 1..14: note = Severe acute respiratory syndrome coronavirus 2
ARAGEAANFCALIL

SEQ ID NO: 17772 - protein, 14 aa, Severe acute respiratory syndrome-related coronavirus
  REGION 1..14: note = Table B: HLA-DQA1*01:02-B1*06:02L
  source 1..14: note = Severe acute respiratory syndrome coronavirus 2
AGEAANFCALILAY

SEQ ID NO: 17773 - protein, 14 aa, Severe acute respiratory syndrome-related coronavirus
  REGION 1..14: note = Table B: HLA-DQA1*01:02-B1*06:02L HLA-DPA1*03:01-B1*105:01L
  source 1..14: note = Severe acute respiratory syndrome coronavirus 2
AANFCALILAYCNK

SEQ ID NO: 17774 - protein, 14 aa, Severe acute respiratory syndrome-related coronavirus
  REGION 1..14: note = Table B: HLA-DQA1*01:02-B1*06:02L
  source 1..14: note = Severe acute respiratory syndrome coronavirus 2
ANFCALILAYCNKT

SEQ ID NO: 17775 - protein, 11 aa, Severe acute respiratory syndrome-related coronavirus
  REGION 1..11: note = Table B: HLA-DQA1*01:02-B1*06:02L HLA-DQA1*01:03-B1*06:01L HLA-DRB1*15:03L
  source 1..11: note = Severe acute respiratory syndrome coronavirus 2
LILAYCNKTVG

SEQ ID NO: 17776 - protein, 12 aa, Severe acute respiratory syndrome-related coronavirus
  REGION 1..12: note = Table B: HLA-DQA1*01:02-B1*06:02L HLA-DRB1*15:03L
  source 1..12: note = Severe acute respiratory syndrome coronavirus 2
ILAYCNKTVGEL

SEQ ID NO: 17777 - protein, 12 aa, Severe acute respiratory syndrome-related coronavirus
  REGION 1..12: note = Table B: HLA-DQA1*01:02-B1*06:02L
  source 1..12: note = Severe acute respiratory syndrome coronavirus 2
LAYCNKTVGELG

SEQ ID NO: 17778 - protein, 14 aa, Severe acute respiratory syndrome-related coronavirus
  REGION 1..14: note = Table B: HLA-DQA1*01:02-B1*06:02L
  source 1..14: note = Severe acute respiratory syndrome coronavirus 2
AYCNKTVGELGDVR

SEQ ID NO: 17779 - protein, 11 aa, Severe acute respiratory syndrome-related coronavirus
  REGION 1..11: note = Table B: HLA-DQA1*01:02-B1*06:02L HLA-DRB1*01:02L HLA-DPA1*01:03-B1*03:01L HLA-DQA1*05:05-B1*03:19L HLA-DPA1*03:01-B1*105:01L HLA-DRB1*15:03L
  source 1..11: note = Severe acute respiratory syndrome coronavirus 2
TVGELGDVRET

SEQ ID NO: 17780 - protein, 10 aa, Severe acute respiratory syndrome-related coronavirus
  REGION 1..10: note = Table B: HLA-DQA1*01:02-B1*06:02L HLA-DPA1*03:01-B1*105:01L
  source 1..10: note = Severe acute respiratory syndrome coronavirus 2
DVRETMSYLF

SEQ ID NO: 17781 - protein, 12 aa, Severe acute respiratory syndrome-related coronavirus
  REGION 1..12: note = Table B: HLA-DQA1*01:02-B1*06:02L HLA-DPA1*03:01-B1*04:02L HLA-DPA1*01:03-B1*04:02L HLA-DRB1*04:08L
  source 1..12: note = Severe acute respiratory syndrome coronavirus 2
YLFQHANLDSCK

SEQ ID NO: 17782 - protein, 14 aa, Severe acute respiratory syndrome-related coronavirus
  REGION 1..14: note = Table B: HLA-DQA1*01:02-B1*06:02L HLA-DRB1*08:04L HLA-DRB1*11:04L HLA-DRB1*11:01L
  source 1..14: note = Severe acute respiratory syndrome coronavirus 2
HANLDSCKRVLNVV

SEQ ID NO: 17783 - protein, 12 aa, Severe acute respiratory syndrome-related coronavirus
  REGION 1..12: note = Table B: HLA-DQA1*01:02-B1*06:02L
  source 1..12: note = Severe acute respiratory syndrome coronavirus 2
VLNVVCKTCGQQ

SEQ ID NO: 17784 - protein, 12 aa, Severe acute respiratory syndrome-related coronavirus
  REGION 1..12: note = Table B: HLA-DQA1*01:02-B1*06:02L
  source 1..12: note = Severe acute respiratory syndrome coronavirus 2
LNVVCKTCGQQQ

SEQ ID NO: 17785 - protein, 12 aa, Severe acute respiratory syndrome-related coronavirus
  REGION 1..12: note = Table B: HLA-DQA1*01:02-B1*06:02L
  source 1..12: note = Severe acute respiratory syndrome coronavirus 2
NVVCKTCGQQQT

SEQ ID NO: 17786 - protein, 12 aa, Severe acute respiratory syndrome-related coronavirus
  REGION 1..12: note = Table B: HLA-DQA1*01:02-B1*06:02L
  source 1..12: note = Severe acute respiratory syndrome coronavirus 2
VVCKTCGQQQTT

SEQ ID NO: 17787 - protein, 14 aa, Severe acute respiratory syndrome-related coronavirus
  REGION 1..14: note = Table B: HLA-DQA1*01:02-B1*06:02L
  source 1..14: note = Severe acute respiratory syndrome coronavirus 2
VCKTCGQQQTTLKG

SEQ ID NO: 17788 - protein, 12 aa, Severe acute respiratory syndrome-related coronavirus
  REGION 1..12: note = Table B: HLA-DQA1*01:02-B1*06:02L HLA-DQA1*01:03-B1*06:01L
  source 1..12: note = Severe acute respiratory syndrome coronavirus 2
LKGVEAVMYMGT

SEQ ID NO: 17789 - protein, 12 aa, Severe acute respiratory syndrome-related coronavirus
  REGION 1..12: note = Table B: HLA-DQA1*01:02-B1*06:02L HLA-DPA1*03:01-B1*105:01L HLA-DPA1*01:02-B1*04:01L HLA-DQA1*01:03-B1*06:01L
  source 1..12: note = Severe acute respiratory syndrome coronavirus 2
KGVEAVMYMGTL

SEQ ID NO: 17790 - protein, 12 aa, Severe acute respiratory syndrome-related coronavirus
  REGION 1..12: note = Table B: HLA-DQA1*01:02-B1*06:02L
  source 1..12: note = Severe acute respiratory syndrome coronavirus 2
GVEAVMYMGTLS

SEQ ID NO: 17791 - protein, 10 aa, Severe acute respiratory syndrome-related coronavirus
  REGION 1..10: note = Table B: HLA-DQA1*01:02-B1*06:02L HLA-DQA1*05:05-B1*03:19L HLA-DPA1*02:01-B1*13:01L HLA-DPA1*03:01-B1*105:01L HLA-DQA1*01:03-B1*06:01L HLA-DRB1*15:03L
  source 1..10: note = Severe acute respiratory syndrome coronavirus 2
YMGTLSYEQF

SEQ ID NO: 17792 - protein, 12 aa, Severe acute respiratory syndrome-related coronavirus
  REGION 1..12: note = Table B: HLA-DQA1*01:02-B1*06:02L HLA-DRB1*08:04L HLA-DRB1*14:01L HLA-DRB1*11:01L HLA-DPA1*01:03-B1*04:02L HLA-DRB1*16:01L HLA-DRB1*04:08L
  source 1..12: note = Severe acute respiratory syndrome coronavirus 2
SYEQFKKGVQIP

SEQ ID NO: 17793 - protein, 12 aa, Severe acute respiratory syndrome-related coronavirus
  REGION 1..12: note = Table B: HLA-DQA1*01:02-B1*06:02L HLA-DQA1*01:03-B1*06:01L
  source 1..12: note = Severe acute respiratory syndrome coronavirus 2
EQFKKGVQIPCT

SEQ ID NO: 17794 - protein, 12 aa, Severe acute respiratory syndrome-related coronavirus
  REGION 1..12: note = Table B: HLA-DQA1*01:02-B1*06:02L
  source 1..12: note = Severe acute respiratory syndrome coronavirus 2
GVQIPCTCGKQA

SEQ ID NO: 17795 - protein, 12 aa, Severe acute respiratory syndrome-related coronavirus
  REGION 1..12: note = Table B: HLA-DQA1*01:02-B1*06:02L
  source 1..12: note = Severe acute respiratory syndrome coronavirus 2
VQIPCTCGKQAT

SEQ ID NO: 17796 - protein, 12 aa, Severe acute respiratory syndrome-related coronavirus
  REGION 1..12: note = Table B: HLA-DQA1*01:02-B1*06:02L HLA-DQA1*01:03-B1*06:01L HLA-DQA1*02:01-B1*03:03L
  source 1..12: note = Severe acute respiratory syndrome coronavirus 2
QATKYLVQQESP

SEQ ID NO: 17797 - protein, 14 aa, Severe acute respiratory syndrome-related coronavirus
  REGION 1..14: note = Table B: HLA-DQA1*01:02-B1*06:02L HLA-DQA1*01:03-B1*06:01L HLA-DQA1*02:01-B1*03:03L
  source 1..14: note = Severe acute respiratory syndrome coronavirus 2
VQQESPFVMMSAPP

SEQ ID NO: 17798 - protein, 13 aa, Severe acute respiratory syndrome-related coronavirus
  REGION 1..13: note = Table B: HLA-DQA1*01:02-B1*06:02L
  source 1..13: note = Severe acute respiratory syndrome coronavirus 2
YELKHGTFTCASE

SEQ ID NO: 17799 - protein, 13 aa, Severe acute respiratory syndrome-related coronavirus
  REGION 1..13: note = Table B: HLA-DQA1*01:02-B1*06:02L
  source 1..13: note = Severe acute respiratory syndrome coronavirus 2
ELKHGTFTCASEY

SEQ ID NO: 17800 - protein, 13 aa, Severe acute respiratory syndrome-related coronavirus
  REGION 1..13: note = Table B: HLA-DQA1*01:02-B1*06:02L
  source 1..13: note = Severe acute respiratory syndrome coronavirus 2
LKHGTFTCASEYT

SEQ ID NO: 17801 - protein, 12 aa, Severe acute respiratory syndrome-related coronavirus
  REGION 1..12: note = Table B: HLA-DQA1*01:02-B1*06:02L
  source 1..12: note = Severe acute respiratory syndrome coronavirus 2
HGTFTCASEYTG

SEQ ID NO: 17802 - protein, 12 aa, Severe acute respiratory syndrome-related coronavirus
  REGION 1..12: note = Table B: HLA-DQA1*01:02-B1*06:02L
  source 1..12: note = Severe acute respiratory syndrome coronavirus 2
GTFTCASEYTGN

SEQ ID NO: 17803 - protein, 12 aa, Severe acute respiratory syndrome-related coronavirus
  REGION 1..12: note = Table B: HLA-DQA1*01:02-B1*06:02L
  source 1..12: note = Severe acute respiratory syndrome coronavirus 2
TFTCASEYTGNY

SEQ ID NO: 17804 - protein, 12 aa, Severe acute respiratory syndrome-related coronavirus
  REGION 1..12: note = Table B: HLA-DQA1*01:02-B1*06:02L HLA-DQA1*01:03-B1*06:01L
  source 1..12: note = Severe acute respiratory syndrome coronavirus 2
FTCASEYTGNYQ

SEQ ID NO: 17805 - protein, 10 aa, Severe acute respiratory syndrome-related coronavirus
  REGION 1..10: note = Table B: HLA-DQA1*01:02-B1*06:02L HLA-DQA1*05:05-B1*03:19L HLA-DQA1*05:01-B1*02:01L
  source 1..10: note = Severe acute respiratory syndrome coronavirus 2
YTGNYQCGHY

SEQ ID NO: 17806 - protein, 14 aa, Severe acute respiratory syndrome-related coronavirus
  REGION 1..14: note = Table B: HLA-DQA1*01:02-B1*06:02L HLA-DRB1*01:02L
  source 1..14: note = Severe acute respiratory syndrome coronavirus 2
NYQCGHYKHITSKE

SEQ ID NO: 17807 - protein, 14 aa, Severe acute respiratory syndrome-related coronavirus
  REGION 1..14: note = Table B: HLA-DQA1*01:02-B1*06:02L
  source 1..14: note = Severe acute respiratory syndrome coronavirus 2
YQCGHYKHITSKET

SEQ ID NO: 17808 - protein, 12 aa, Severe acute respiratory syndrome-related coronavirus
  REGION 1..12: note = Table B: HLA-DQA1*01:02-B1*06:02L HLA-DRB1*01:01L HLA-DRB1*11:04L HLA-DRB1*11:01L HLA-DRB3*01:01L HLA-DPA1*03:01-B1*105:01L HLA-DRB1*07:01L
  source 1..12: note = Severe acute respiratory syndrome coronavirus 2
GHYKHITSKETL

SEQ ID NO: 17809 - protein, 12 aa, Severe acute respiratory syndrome-related coronavirus
  REGION 1..12: note = Table B: HLA-DQA1*01:02-B1*06:02L HLA-DQA1*01-B1*05L HLA-DQA1*01:03-B1*06:01L HLA-DQA1*02:01-B1*03:03L
  source 1..12: note = Severe acute respiratory syndrome coronavirus 2
LTKSSEYKGPIT

SEQ ID NO: 17810 - protein, 13 aa, Severe acute respiratory syndrome-related coronavirus
  REGION 1..13: note = Table B: HLA-DQA1*01:02-B1*06:02L HLA-DPA1*01:02-B1*04:01L
  source 1..13: note = Severe acute respiratory syndrome coronavirus 2
YKENSYTTTIKPV

SEQ ID NO: 17811 - protein, 13 aa, Severe acute respiratory syndrome-related coronavirus
  REGION 1..13: note = Table B: HLA-DQA1*01:02-B1*06:02L
  source 1..13: note = Severe acute respiratory syndrome coronavirus 2
TIKPVTYKLDGVV

SEQ ID NO: 17812 - protein, 17 aa, Severe acute respiratory syndrome-related coronavirus
  REGION 1..17: note = Table B: HLA-DQA1*01:02-B1*06:02L HLA-DPA1*03:01-B1*105:01L
  source 1..17: note = Severe acute respiratory syndrome coronavirus 2
KPVTYKLDGVVCTEIDP

SEQ ID NO: 17813 - protein, 12 aa, Severe acute respiratory syndrome-related coronavirus
  REGION 1..12: note = Table B: HLA-DQA1*01:02-B1*06:02L HLA-DQA1*01-B1*05L HLA-DQA1*05:01-B1*02:01L HLA-DPA1*03:01-B1*105:01L HLA-DQA1*03:01-B1*03:02L
  source 1..12: note = Severe acute respiratory syndrome coronavirus 2
GVVCTEIDPKLD

SEQ ID NO: 17814 - protein, 10 aa, Severe acute respiratory syndrome-related coronavirus
  REGION 1..10: note = Table B: HLA-DQA1*01:02-B1*06:02L HLA-DQA1*05:05-B1*03:19L HLA-DQA1*02:01-B1*03:03L
  source 1..10: note = Severe acute respiratory syndrome coronavirus 2
DNYYKKDNSY

SEQ ID NO: 17815 - protein, 13 aa, Severe acute respiratory syndrome-related coronavirus
  REGION 1..13: note = Table B: HLA-DQA1*01:02-B1*06:02L HLA-DPA1*02:01-B1*13:01L HLA-DRB1*15:03L
  source 1..13: note = Severe acute respiratory syndrome coronavirus 2
KKDNSYFTEQPID

SEQ ID NO: 17816 - protein, 10 aa, Severe acute respiratory syndrome-related coronavirus
  REGION 1..10: note = Table B: HLA-DQA1*01:02-B1*06:02L HLA-DQA1*05:05-B1*03:19L HLA-DPA1*02:01-B1*13:01L HLA-DQA1*01:03-B1*06:01L HLA-DQA1*02:01-B1*03:03L
  source 1..10: note = Severe acute respiratory syndrome coronavirus 2
PNASFDNFKF

SEQ ID NO: 17817 - protein, 13 aa, Severe acute respiratory syndrome-related coronavirus
  REGION 1..13: note = Table B: HLA-DQA1*01:02-B1*06:02L HLA-DRB1*01:02L HLA-DPA1*03:01-B1*105:01L HLA-DRB1*16:01L HLA-DRB1*15:03L
  source 1..13: note = Severe acute respiratory syndrome coronavirus 2
FKFVCDNIKFADD

SEQ ID NO: 17818 - protein, 13 aa, Severe acute respiratory syndrome-related coronavirus
  REGION 1..13: note = Table B: HLA-DQA1*01:02-B1*06:02L HLA-DPA1*03:01-B1*105:01L
  source 1..13: note = Severe acute respiratory syndrome coronavirus 2
FVCDNIKFADDLN

SEQ ID NO: 17819 - protein, 12 aa, Severe acute respiratory syndrome-related coronavirus
  REGION 1..12: note = Table B: HLA-DQA1*01:02-B1*06:02L HLA-DRB1*01:02L HLA-DRB1*12:01L HLA-DRB1*04:08L HLA-DRB1*15:03L
  source 1..12: note = Severe acute respiratory syndrome coronavirus 2
LTGYKKPASREL

SEQ ID NO: 17820 - protein, 12 aa, Severe acute respiratory syndrome-related coronavirus
  REGION 1..12: note = Table B: HLA-DQA1*01:02-B1*06:02L HLA-DRB1*04:08L HLA-DRB1*15:03L
  source 1..12: note = Severe acute respiratory syndrome coronavirus 2
ELKVTFFPDLNG

SEQ ID NO: 17821 - protein, 10 aa, Severe acute respiratory syndrome-related coronavirus
  REGION 1..10: note = Table B: HLA-DQA1*01:02-B1*06:02L HLA-DQA1*05:05-B1*03:19L HLA-DQA1*05:01-B1*02:01L
  source 1..10: note = Severe acute respiratory syndrome coronavirus 2
LNGDVVAIDY

SEQ ID NO: 17822 - protein, 12 aa, Severe acute respiratory syndrome-related coronavirus
  REGION 1..12: note = Table B: HLA-DQA1*01:02-B1*06:02L HLA-DRB1*08:04L HLA-DRB1*14:01L HLA-DRB1*11:04L
  source 1..12: note = Severe acute respiratory syndrome coronavirus 2
HYTPSFKKGAKL

SEQ ID NO: 17823 - protein, 14 aa, Severe acute respiratory syndrome-related coronavirus
  REGION 1..14: note = Table B: HLA-DQA1*01:02-B1*06:02L HLA-DRB1*01:02L HLA-DRB1*08:01L HLA-DRB1*16:01L HLA-DRB1*04:08L HLA-DRB1*15:03L
  source 1..14: note = Severe acute respiratory syndrome coronavirus 2
AKLLHKPIVWHVNN

SEQ ID NO: 17824 - protein, 14 aa, Severe acute respiratory syndrome-related coronavirus
  REGION 1..14: note = Table B: HLA-DQA1*01:02-B1*06:02L HLA-DPA1*03:01-B1*105:01L HLA-DQA1*05:05-B1*03:01L
  source 1..14: note = Severe acute respiratory syndrome coronavirus 2
PIVWHVNNATNKAT

SEQ ID NO: 17825 - protein, 11 aa, Severe acute respiratory syndrome-related coronavirus
  REGION 1..11: note = Table B: HLA-DQA1*01:02-B1*06:02L HLA-DRB1*08:01L
  source 1..11: note = Severe acute respiratory syndrome coronavirus 2
NATNKATYKPN

SEQ ID NO: 17826 - protein, 10 aa, Severe acute respiratory syndrome-related coronavirus
  REGION 1..10: note = Table B: HLA-DQA1*01:02-B1*06:02L HLA-DQA1*02:01-B1*03:03L
  source 1..10: note = Severe acute respiratory syndrome coronavirus 2
NKATYKPNTW

SEQ ID NO: 17827 - protein, 14 aa, Severe acute respiratory syndrome-related coronavirus
  REGION 1..14: note = Table B: HLA-DQA1*01:02-B1*06:02L
  source 1..14: note = Severe acute respiratory syndrome coronavirus 2
PNTWCIRCLWSTKP

SEQ ID NO: 17828 - protein, 14 aa, Severe acute respiratory syndrome-related coronavirus
  REGION 1..14: note = Table B: HLA-DQA1*01:02-B1*06:02L HLA-DQA1*05:05-B1*03:01L HLA-DQA1*01:03-B1*06:01L HLA-DQA1*02:01-B1*03:03L
  source 1..14: note = Severe acute respiratory syndrome coronavirus 2
SEDAQGMDNLACED

SEQ ID NO: 17829 - protein, 14 aa, Severe acute respiratory syndrome-related coronavirus
  REGION 1..14: note = Table B: HLA-DQA1*01:02-B1*06:02L HLA-DQA1*05:05-B1*03:01L HLA-DQA1*01:03-B1*06:01L
  source 1..14: note = Severe acute respiratory syndrome coronavirus 2
EDAQGMDNLACEDL

SEQ ID NO: 17830 - protein, 14 aa, Severe acute respiratory syndrome-related coronavirus
  REGION 1..14: note = Table B: HLA-DQA1*01:02-B1*06:02L
  source 1..14: note = Severe acute respiratory syndrome coronavirus 2
DAQGMDNLACEDLK

SEQ ID NO: 17831 - protein, 14 aa, Severe acute respiratory syndrome-related coronavirus
  REGION 1..14: note = Table B: HLA-DQA1*01:02-B1*06:02L
  source 1..14: note = Severe acute respiratory syndrome coronavirus 2
AQGMDNLACEDLKP

SEQ ID NO: 17832 - protein, 13 aa, Severe acute respiratory syndrome-related coronavirus
  REGION 1..13: note = Table B: HLA-DQA1*01:02-B1*06:02L HLA-DPA1*03:01-B1*105:01L HLA-DQA1*01:03-B1*06:01L
  source 1..13: note = Severe acute respiratory syndrome coronavirus 2
GMDNLACEDLKPV

SEQ ID NO: 17833 - protein, 11 aa, Severe acute respiratory syndrome-related coronavirus
  REGION 1..11: note = Table B: HLA-DQA1*01:02-B1*06:02L
  source 1..11: note = Severe acute respiratory syndrome coronavirus 2
NLACEDLKPVS

SEQ ID NO: 17834 - protein, 12 aa, Severe acute respiratory syndrome-related coronavirus
  REGION 1..12: note = Table B: HLA-DQA1*01:02-B1*06:02L
  source 1..12: note = Severe acute respiratory syndrome coronavirus 2
LACEDLKPVSEE

SEQ ID NO: 17835 - protein, 11 aa, Severe acute respiratory syndrome-related coronavirus
  REGION 1..11: note = Table B: HLA-DQA1*01:02-B1*06:02L
  source 1..11: note = Severe acute respiratory syndrome coronavirus 2
DVLECNVKTTE

SEQ ID NO: 17836 - protein, 12 aa, Severe acute respiratory syndrome-related coronavirus
  REGION 1..12: note = Table B: HLA-DQA1*01:02-B1*06:02L
  source 1..12: note = Severe acute respiratory syndrome coronavirus 2
VLECNVKTTEVV

SEQ ID NO: 17837 - protein, 12 aa, Severe acute respiratory syndrome-related coronavirus
  REGION 1..12: note = Table B: HLA-DQA1*01:02-B1*06:02L HLA-DRB1*01:02L
  source 1..12: note = Severe acute respiratory syndrome coronavirus 2
LKITEEVGHTDL

SEQ ID NO: 17838 - protein, 11 aa, Severe acute respiratory syndrome-related coronavirus
  REGION 1..11: note = Table B: HLA-DQA1*01:02-B1*06:02L HLA-DPA1*01:03-B1*04:01L
  source 1..11: note = Severe acute respiratory syndrome coronavirus 2
ITEEVGHTDLM

SEQ ID NO: 17839 - protein, 11 aa, Severe acute respiratory syndrome-related coronavirus
  REGION 1..11: note = Table B: HLA-DQA1*01:02-B1*06:02L
  source 1..11: note = Severe acute respiratory syndrome coronavirus 2
NSSLTIKKPNE

SEQ ID NO: 17840 - protein, 12 aa, Severe acute respiratory syndrome-related coronavirus
  REGION 1..12: note = Table B: HLA-DQA1*01:02-B1*06:02L
  source 1..12: note = Severe acute respiratory syndrome coronavirus 2
SSLTIKKPNELS

SEQ ID NO: 17841 - protein, 14 aa, Severe acute respiratory syndrome-related coronavirus
  REGION 1..14: note = Table B: HLA-DQA1*01:02-B1*06:02L HLA-DRB1*01:02L HLA-DRB1*15:03L
  source 1..14: note = Severe acute respiratory syndrome coronavirus 2
LTIKKPNELSRVLG

SEQ ID NO: 17842 - protein, 12 aa, Severe acute respiratory syndrome-related coronavirus
  REGION 1..12: note = Table B: HLA-DQA1*01:02-B1*06:02L HLA-DQA1*01:03-B1*06:01L
  source 1..12: note = Severe acute respiratory syndrome coronavirus 2
PNELSRVLGLKT

SEQ ID NO: 17843 - protein, 11 aa, Severe acute respiratory syndrome-related coronavirus
  REGION 1..11: note = Table B: HLA-DQA1*01:02-B1*06:02L HLA-DQA1*01:03-B1*06:01L HLA-DRB1*15:03L
  source 1..11: note = Severe acute respiratory syndrome coronavirus 2
HGLAAVNSVPW

SEQ ID NO: 17844 - protein, 13 aa, Severe acute respiratory syndrome-related coronavirus
  REGION 1..13: note = Table B: HLA-DQA1*01:02-B1*06:02L HLA-DQA1*03:01-B1*03:02L
  source 1..13: note = Severe acute respiratory syndrome coronavirus 2
YAKPFLNKVVSTT

SEQ ID NO: 17845 - protein, 10 aa, Severe acute respiratory syndrome-related coronavirus
  REGION 1..10: note = Table B: HLA-DQA1*01:02-B1*06:02L HLA-DPA1*03:01-B1*105:01L HLA-DQA1*01:03-B1*06:01L
  source 1..10: note = Severe acute respiratory syndrome coronavirus 2
STTTNIVTRC

SEQ ID NO: 17846 - protein, 10 aa, Severe acute respiratory syndrome-related coronavirus
  REGION 1..10: note = Table B: HLA-DQA1*01:02-B1*06:02L HLA-DPA1*03:01-B1*105:01L HLA-DQA1*01:03-B1*06:01L
  source 1..10: note = Severe acute respiratory syndrome coronavirus 2
TTTNIVTRCL

SEQ ID NO: 17847 - protein, 12 aa, Severe acute respiratory syndrome-related coronavirus
  REGION 1..12: note = Table B: HLA-DQA1*01:02-B1*06:02L
  source 1..12: note = Severe acute respiratory syndrome coronavirus 2
IVTRCLNRVCTN

SEQ ID NO: 17848 - protein, 10 aa, Severe acute respiratory syndrome-related coronavirus
  REGION 1..10: note = Table B: HLA-DQA1*01:02-B1*06:02L
  source 1..10: note = Severe acute respiratory syndrome coronavirus 2
RVCTNYMPYF

SEQ ID NO: 17849 - protein, 13 aa, Severe acute respiratory syndrome-related coronavirus
  REGION 1..13: note = Table B: HLA-DQA1*01:02-B1*06:02L HLA-DPA1*03:01-B1*105:01L HLA-DRB1*15:03L
  source 1..13: note = Severe acute respiratory syndrome coronavirus 2
TLLLQLCTFTRST

SEQ ID NO: 17850 - protein, 11 aa, Severe acute respiratory syndrome-related coronavirus
  REGION 1..11: note = Table B: HLA-DQA1*01:02-B1*06:02L HLA-DQA1*01:03-B1*06:01L
  source 1..11: note = Severe acute respiratory syndrome coronavirus 2
LQLCTFTRSTN

SEQ ID NO: 17851 - protein, 14 aa, Severe acute respiratory syndrome-related coronavirus
  REGION 1..14: note = Table B: HLA-DQA1*01:02-B1*06:02L
  source 1..14: note = Severe acute respiratory syndrome coronavirus 2
PTTIAKNTVKSVGK

SEQ ID NO: 17852 - protein, 14 aa, Severe acute respiratory syndrome-related coronavirus
  REGION 1..14: note = Table B: HLA-DQA1*01:02-B1*06:02L HLA-DRB1*01:02L HLA-DRB1*14:01L HLA-DPA1*02:01-B1*13:01L
  source 1..14: note = Severe acute respiratory syndrome coronavirus 2
NTVKSVGKFCLEAS

SEQ ID NO: 17853 - protein, 12 aa, Severe acute respiratory syndrome-related coronavirus
  REGION 1..12: note = Table B: HLA-DQA1*01:02-B1*06:02L
  source 1..12: note = Severe acute respiratory syndrome coronavirus 2
SVGKFCLEASFN

SEQ ID NO: 17854 - protein, 12 aa, Severe acute respiratory syndrome-related coronavirus
  REGION 1..12: note = Table B: HLA-DQA1*01:02-B1*06:02L HLA-DPA1*03:01-B1*105:01L HLA-DQA1*01:03-B1*06:01L
  source 1..12: note = Severe acute respiratory syndrome coronavirus 2
LEASFNYLKSPN

SEQ ID NO: 17855 - protein, 10 aa, Severe acute respiratory syndrome-related coronavirus
  REGION 1..10: note = Table B: HLA-DQA1*01:02-B1*06:02L HLA-DPA1*03:01-B1*04:02L HLA-DQA1*05:05-B1*03:19L HLA-DQA1*05:01-B1*02:01L HLA-DPA1*02:01-B1*13:01L HLA-DPA1*03:01-B1*105:01L HLA-DQA1*01:03-B1*06:01L HLA-DQA1*02:01-B1*03:03L
  REGION 1..10: note = CONT. FROM ABOVE: HLA-DRB1*15:03L
  source 1..10: note = Severe acute respiratory syndrome coronavirus 2
FSKLINIIIW

SEQ ID NO: 17856 - protein, 10 aa, Severe acute respiratory syndrome-related coronavirus
  REGION 1..10: note = Table B: HLA-DQA1*01:02-B1*06:02L HLA-DRB1*15:03L
  source 1..10: note = Severe acute respiratory syndrome coronavirus 2
KLINIIIWFL

SEQ ID NO: 17857 - protein, 13 aa, Severe acute respiratory syndrome-related coronavirus
  REGION 1..13: note = Table B: HLA-DQA1*01:02-B1*06:02L
  source 1..13: note = Severe acute respiratory syndrome coronavirus 2
SVCLGSLIYSTAA

SEQ ID NO: 17858 - protein, 10 aa, Severe acute respiratory syndrome-related coronavirus
  REGION 1..10: note = Table B: HLA-DQA1*01:02-B1*06:02L HLA-DRB1*08:77L HLA-DPA1*01:03-B1*03:01L HLA-DQA1*05:05-B1*03:19L HLA-DQA1*05:01-B1*02:01L HLA-DRB4*01:01L HLA-DPA1*01:03-B1*04:01L HLA-DPA1*01:03-B1*104:01L
  REGION 1..10: note = CONT. FROM ABOVE: HLA-DRB1*16:01L HLA-DQA1*02:01-B1*03:03L HLA-D RB1*15:03L
  source 1..10: note = Severe acute respiratory syndrome coronavirus 2
LMSNLGMPSY

SEQ ID NO: 17859 - protein, 12 aa, Severe acute respiratory syndrome-related coronavirus
  REGION 1..12: note = Table B: HLA-DQA1*01:02-B1*06:02L HLA-DQA1*05:05-B1*03:19L HLA-DQA1*05:05-B1*03:01L HLA-DQA1*01:03-B1*06:01L
  source 1..12: note = Severe acute respiratory syndrome coronavirus 2
MSNLGMPSYCTG

SEQ ID NO: 17860 - protein, 12 aa, Severe acute respiratory syndrome-related coronavirus
  REGION 1..12: note = Table B: HLA-DQA1*01:02-B1*06:02L HLA-DQA1*05:05-B1*03:19L HLA-DQA1*01:03-B1*06:01L
  source 1..12: note = Severe acute respiratory syndrome coronavirus 2
SNLGMPSYCTGY

SEQ ID NO: 17861 - protein, 12 aa, Severe acute respiratory syndrome-related coronavirus
  REGION 1..12: note = Table B: HLA-DQA1*01:02-B1*06:02L HLA-DQA1*01:03-B1*06:01L
  source 1..12: note = Severe acute respiratory syndrome coronavirus 2
NLGMPSYCTGYR

SEQ ID NO: 17862 - protein, 13 aa, Severe acute respiratory syndrome-related coronavirus
  REGION 1..13: note = Table B: HLA-DQA1*01:02-B1*06:02L
  source 1..13: note = Severe acute respiratory syndrome coronavirus 2
LGMPSYCTGYREG

SEQ ID NO: 17863 - protein, 11 aa, Severe acute respiratory syndrome-related coronavirus
  REGION 1..11: note = Table B: HLA-DQA1*01:02-B1*06:02L HLA-DQA1*05:05-B1*03:19L
  source 1..11: note = Severe acute respiratory syndrome coronavirus 2
PSYCTGYREGY

SEQ ID NO: 17864 - protein, 14 aa, Severe acute respiratory syndrome-related coronavirus
  REGION 1..14: note = Table B: HLA-DQA1*01:02-B1*06:02L
  source 1..14: note = Severe acute respiratory syndrome coronavirus 2
IATYCTGSIPCSVC

SEQ ID NO: 17865 - protein, 12 aa, Severe acute respiratory syndrome-related coronavirus
  REGION 1..12: note = Table B: HLA-DQA1*01:02-B1*06:02L
  source 1..12: note = Severe acute respiratory syndrome coronavirus 2
SIPCSVCLSGLD

SEQ ID NO: 17866 - protein, 15 aa, Severe acute respiratory syndrome-related coronavirus
  REGION 1..15: note = Table B: HLA-DQA1*01:02-B1*06:02L
  source 1..15: note = Severe acute respiratory syndrome coronavirus 2
SVCLSGLDSLDTYPS

SEQ ID NO: 17867 - protein, 12 aa, Severe acute respiratory syndrome-related coronavirus
  REGION 1..12: note = Table B: HLA-DQA1*01:02-B1*06:02L HLA-DPA1*03:01-B1*105:01L HLA-DQA1*05:05-B1*03:01L HLA-DQA1*01:03-B1*06:01L HLA-DQA1*02:01-B1*03:03L
  source 1..12: note = Severe acute respiratory syndrome coronavirus 2
GLDSLDTYPSLE

SEQ ID NO: 17868 - protein, 12 aa, Severe acute respiratory syndrome-related coronavirus
  REGION 1..12: note = Table B: HLA-DQA1*01:02-B1*06:02L HLA-DRB1*01:02L HLA-DRB1*12:01L HLA-DPA1*03:01-B1*105:01L HLA-DRB1*16:01L HLA-DRB1*15:03L
  source 1..12: note = Severe acute respiratory syndrome coronavirus 2
SLDTYPSLETIQ

SEQ ID NO: 17869 - protein, 10 aa, Severe acute respiratory syndrome-related coronavirus
  REGION 1..10: note = Table B: HLA-DQA1*01:02-B1*06:02L HLA-DQA1*05:05-B1*03:19L HLA-DRB4*01:01L HLA-DPA1*01:03-B1*04:01L HLA-DPA1*02:01-B1*13:01L HLA-DPA1*03:01-B1*105:01L HLA-DQA1*01:03-B1*06:01L HLA-DQA1*02:01-B1*03:03L
  REGION 1..10: note = CONT. FROM ABOVE: HLA-DRB1*15:03L
  source 1..10: note = Severe acute respiratory syndrome coronavirus 2
IQITISSFKW

SEQ ID NO: 17870 - protein, 12 aa, Severe acute respiratory syndrome-related coronavirus
  REGION 1..12: note = Table B: HLA-DQA1*01:02-B1*06:02L HLA-DPA1*01:03-B1*04:02L HLA-DRB1*15:03L
  source 1..12: note = Severe acute respiratory syndrome coronavirus 2
ITISSFKWDLTA

SEQ ID NO: 17871 - protein, 10 aa, Severe acute respiratory syndrome-related coronavirus
  REGION 1..10: note = Table B: HLA-DQA1*01:02-B1*06:02L
  source 1..10: note = Severe acute respiratory syndrome coronavirus 2
LTAFGLVAEW

SEQ ID NO: 17872 - protein, 10 aa, Severe acute respiratory syndrome-related coronavirus
  REGION 1..10: note = Table B: HLA-DQA1*01:02-B1*06:02L HLA-DPA1*02:01-B1*13:01L HLA-DPA1*03:01-B1*105:01L HLA-DQA1*01:03-B1*06:01L HLA-DRB1*15:03L
  source 1..10: note = Severe acute respiratory syndrome coronavirus 2
TAFGLVAEWF

SEQ ID NO: 17873 - protein, 10 aa, Severe acute respiratory syndrome-related coronavirus
  REGION 1..10: note = Table B: HLA-DQA1*01:02-B1*06:02L HLA-DPA1*01:03-B1*03:01L HLA-DPA1*03:01-B1*04:02L HLA-DRB1*11:02L HLA-DRB1*14:02L HLA-DQA1*05:05-B1*03:19L HLA-DQA1*05:01-B1*02:01L HLA-DRB4*01:01L HLA-DPA1*01:03-B1*04:01L
  REGION 1..10: note = CONT. FROM ABOVE: HLA-DPA1*01:03-B1*04:02L HLA-DPA1*02:01-B1*13: 01L HLA-DPA1*03:01-B1*105:01L HLA-DPA1*01:03-B1*104:01L HLA-DRB1 *16:01L HLA-DQA1*01:03-B1*06:01L HLA-DQA1*02:01-B1*03:03L HLA-DR B1*15:03L
  source 1..10: note = Severe acute respiratory syndrome coronavirus 2
GLVAEWFLAY

SEQ ID NO: 17874 - protein, 11 aa, Severe acute respiratory syndrome-related coronavirus
  REGION 1..11: note = Table B: HLA-DQA1*01:02-B1*06:02L HLA-DPA1*01:03-B1*04:02L HLA-DQA1*01:03-B1*06:01L
  source 1..11: note = Severe acute respiratory syndrome coronavirus 2
EWFLAYILFTR

SEQ ID NO: 17875 - protein, 10 aa, Severe acute respiratory syndrome-related coronavirus
  REGION 1..10: note = Table B: HLA-DQA1*01:02-B1*06:02L HLA-DPA1*03:01-B1*04:02L HLA-DPA1*01:03-B1*04:01L HLA-DRB1*12:01L HLA-DPA1*02:01-B1*13:01L HLA-DPA1*03:01-B1*105:01L HLA-DPA1*01:02-B1*04:01L HLA-DQA1*01:03-B1*06:01L
  REGION 1..10: note = CONT. FROM ABOVE: HLA-DRB1*15:03L
  source 1..10: note = Severe acute respiratory syndrome coronavirus 2
LAYILFTRFF

SEQ ID NO: 17876 - protein, 10 aa, Severe acute respiratory syndrome-related coronavirus
  REGION 1..10: note = Table B: HLA-DQA1*01:02-B1*06:02L HLA-DPA1*03:01-B1*04:02L HLA-DQA1*05:05-B1*03:19L HLA-DPA1*02:01-B1*13:01L HLA-DPA1*01:03-B1*104:01L HLA-DQA1*01:03-B1*06:01L HLA-DRB1*15:03L
  source 1..10: note = Severe acute respiratory syndrome coronavirus 2
YILFTRFFYV

SEQ ID NO: 17877 - protein, 14 aa, Severe acute respiratory syndrome-related coronavirus
  REGION 1..14: note = Table B: HLA-DQA1*01:02-B1*06:02L HLA-DRB1*01:02L HLA-DPA1*01:03-B1*04:02L HLA-DRB1*15:03L
  source 1..14: note = Severe acute respiratory syndrome coronavirus 2
TRFFYVLGLAAIMQ

SEQ ID NO: 17878 - protein, 11 aa, Severe acute respiratory syndrome-related coronavirus
  REGION 1..11: note = Table B: HLA-DQA1*01:02-B1*06:02L
  source 1..11: note = Severe acute respiratory syndrome coronavirus 2
VLGLAAIMQLF

SEQ ID NO: 17879 - protein, 10 aa, Severe acute respiratory syndrome-related coronavirus
  REGION 1..10: note = Table B: HLA-DQA1*01:02-B1*06:02L HLA-DRB1*15:03L
  source 1..10: note = Severe acute respiratory syndrome coronavirus 2
GLAAIMQLFF

SEQ ID NO: 17880 - protein, 10 aa, Severe acute respiratory syndrome-related coronavirus
  REGION 1..10: note = Table B: HLA-DQA1*01:02-B1*06:02L HLA-DQA1*05:05-B1*03:19L HLA-DQA1*05:01-B1*02:01L HLA-DPA1*03:01-B1*105:01L HLA-DPA1*01:03-B1*104:01L HLA-DRB1*15:03L
  source 1..10: note = Severe acute respiratory syndrome coronavirus 2
AAIMQLFFSY

SEQ ID NO: 17881 - protein, 10 aa, Severe acute respiratory syndrome-related coronavirus
  REGION 1..10: note = Table B: HLA-DQA1*01:02-B1*06:02L
  source 1..10: note = Severe acute respiratory syndrome coronavirus 2
RMYIFFASFY

SEQ ID NO: 17882 - protein, 10 aa, Severe acute respiratory syndrome-related coronavirus
  REGION 1..10: note = Table B: HLA-DQA1*01:02-B1*06:02L HLA-DRB4*01:01L
  source 1..10: note = Severe acute respiratory syndrome coronavirus 2
MYIFFASFYY

SEQ ID NO: 17883 - protein, 10 aa, Severe acute respiratory syndrome-related coronavirus
  REGION 1..10: note = Table B: HLA-DQA1*01:02-B1*06:02L HLA-DPA1*01:03-B1*03:01L HLA-DQA1*01-B1*05L HLA-DQA1*05:05-B1*03:19L HLA-DQA1*05:01-B1*02:01L HLA-DPA1*01:03-B1*04:01L HLA-DPA1*01:03-B1*104:01L HLA-DQA1*01:03-B1*06:01L
  REGION 1..10: note = CONT. FROM ABOVE: HLA-DQA1*02:01-B1*03:03L
  source 1..10: note = Severe acute respiratory syndrome coronavirus 2
ASFYYVWKSY

SEQ ID NO: 17884 - protein, 12 aa, Severe acute respiratory syndrome-related coronavirus
  REGION 1..12: note = Table B: HLA-DQA1*01:02-B1*06:02L
  source 1..12: note = Severe acute respiratory syndrome coronavirus 2
YVHVVDGCNSST

SEQ ID NO: 17885 - protein, 12 aa, Severe acute respiratory syndrome-related coronavirus
  REGION 1..12: note = Table B: HLA-DQA1*01:02-B1*06:02L
  source 1..12: note = Severe acute respiratory syndrome coronavirus 2
HVVDGCNSSTCM

SEQ ID NO: 17886 - protein, 12 aa, Severe acute respiratory syndrome-related coronavirus
  REGION 1..12: note = Table B: HLA-DQA1*01:02-B1*06:02L
  source 1..12: note = Severe acute respiratory syndrome coronavirus 2
VVDGCNSSTCMM

SEQ ID NO: 17887 - protein, 13 aa, Severe acute respiratory syndrome-related coronavirus
  REGION 1..13: note = Table B: HLA-DQA1*01:02-B1*06:02L
  source 1..13: note = Severe acute respiratory syndrome coronavirus 2
DGCNSSTCMMCYK

SEQ ID NO: 17888 - protein, 12 aa, Severe acute respiratory syndrome-related coronavirus
  REGION 1..12: note = Table B: HLA-DQA1*01:02-B1*06:02L HLA-DQA1*01:03-B1*06:01L
  source 1..12: note = Severe acute respiratory syndrome coronavirus 2
NSSTCMMCYKRN

SEQ ID NO: 17889 - protein, 10 aa, Severe acute respiratory syndrome-related coronavirus
  REGION 1..10: note = Table B: HLA-DQA1*01:02-B1*06:02L HLA-DQA1*01:03-B1*06:01L HLA-DQA1*02:01-B1*03:03L
  source 1..10: note = Severe acute respiratory syndrome coronavirus 2
ECTTIVNGVR

SEQ ID NO: 17890 - protein, 11 aa, Severe acute respiratory syndrome-related coronavirus
  REGION 1..11: note = Table B: HLA-DQA1*01:02-B1*06:02L HLA-DRB1*08:01L HLA-DQA1*05:05-B1*03:19L HLA-DRB1*04:10L HLA-DPA1*03:01-B1*105:01L HLA-DQA1*05:05-B1*03:01L
  source 1..11: note = Severe acute respiratory syndrome coronavirus 2
SFYVYANGGKG

SEQ ID NO: 17891 - protein, 12 aa, Severe acute respiratory syndrome-related coronavirus
  REGION 1..12: note = Table B: HLA-DQA1*01:02-B1*06:02L
  source 1..12: note = Severe acute respiratory syndrome coronavirus 2
GGKGFCKLHNWN

SEQ ID NO: 17892 - protein, 14 aa, Severe acute respiratory syndrome-related coronavirus
  REGION 1..14: note = Table B: HLA-DQA1*01:02-B1*06:02L
  source 1..14: note = Severe acute respiratory syndrome coronavirus 2
WNCVNCDTFCAGST

SEQ ID NO: 17893 - protein, 14 aa, Severe acute respiratory syndrome-related coronavirus
  REGION 1..14: note = Table B: HLA-DQA1*01:02-B1*06:02L HLA-DQA1*05:05-B1*03:01L HLA-DQA1*01:03-B1*06:01L
  source 1..14: note = Severe acute respiratory syndrome coronavirus 2
DTFCAGSTFISDEV

SEQ ID NO: 17894 - protein, 14 aa, Severe acute respiratory syndrome-related coronavirus
  REGION 1..14: note = Table B: HLA-DQA1*01:02-B1*06:02L HLA-DQA1*01:03-B1*06:01L
  source 1..14: note = Severe acute respiratory syndrome coronavirus 2
TFCAGSTFISDEVA

SEQ ID NO: 17895 - protein, 12 aa, Severe acute respiratory syndrome-related coronavirus
  REGION 1..12: note = Table B: HLA-DQA1*01:02-B1*06:02L HLA-DQA1*01:01-B1*05:01L HLA-DPA1*03:01-B1*105:01L HLA-DQA1*05:05-B1*03:01L
  source 1..12: note = Severe acute respiratory syndrome coronavirus 2
ISDEVARDLSLQ

SEQ ID NO: 17896 - protein, 13 aa, Severe acute respiratory syndrome-related coronavirus
  REGION 1..13: note = Table B: HLA-DQA1*01:02-B1*06:02L
  source 1..13: note = Severe acute respiratory syndrome coronavirus 2
PTDQSSYIVDSVT

SEQ ID NO: 17897 - protein, 13 aa, Severe acute respiratory syndrome-related coronavirus
  REGION 1..13: note = Table B: HLA-DQA1*01:02-B1*06:02L HLA-DRB1*01:01L HLA-DRB1*08:01L HLA-DRB4*01:01L HLA-DPA1*01:03-B1*04:02L HLA-DPA1*02:01-B1*13:01L HLA-DRB1*07:01L
  source 1..13: note = Severe acute respiratory syndrome coronavirus 2
SSYIVDSVTVKNG

SEQ ID NO: 17898 - protein, 12 aa, Severe acute respiratory syndrome-related coronavirus
  REGION 1..12: note = Table B: HLA-DQA1*01:02-B1*06:02L HLA-DQA1*05:05-B1*03:19L
  source 1..12: note = Severe acute respiratory syndrome coronavirus 2
YIVDSVTVKNGS

SEQ ID NO: 17899 - protein, 12 aa, Severe acute respiratory syndrome-related coronavirus
  REGION 1..12: note = Table B: HLA-DQA1*01:02-B1*06:02L HLA-DQA1*05:05-B1*03:19L HLA-DPA1*03:01-B1*105:01L HLA-DQA1*05:05-B1*03:01L HLA-DQA1*01:03-B1*06:01L
  source 1..12: note = Severe acute respiratory syndrome coronavirus 2
IVDSVTVKNGSI

SEQ ID NO: 17900 - protein, 11 aa, Severe acute respiratory syndrome-related coronavirus
  REGION 1..11: note = Table B: HLA-DQA1*01:02-B1*06:02L
  source 1..11: note = Severe acute respiratory syndrome coronavirus 2
VKNGSIHLYFD

SEQ ID NO: 17901 - protein, 12 aa, Severe acute respiratory syndrome-related coronavirus
  REGION 1..12: note = Table B: HLA-DQA1*01:02-B1*06:02L
  source 1..12: note = Severe acute respiratory syndrome coronavirus 2
KNGSIHLYFDKA

SEQ ID NO: 17902 - protein, 12 aa, Severe acute respiratory syndrome-related coronavirus
  REGION 1..12: note = Table B: HLA-DQA1*01:02-B1*06:02L HLA-DQA1*03:01-B1*03:02L HLA-DRB1*16:01L HLA-DRB1*15:03L
  source 1..12: note = Severe acute respiratory syndrome coronavirus 2
NGSIHLYFDKAG

SEQ ID NO: 17903 - protein, 13 aa, Severe acute respiratory syndrome-related coronavirus
  REGION 1..13: note = Table B: HLA-DQA1*01:02-B1*06:02L HLA-DRB1*01:02L HLA-DQA1*02:01-B1*03:03L
  source 1..13: note = Severe acute respiratory syndrome coronavirus 2
FDKAGQKTYERHS

SEQ ID NO: 17904 - protein, 15 aa, Severe acute respiratory syndrome-related coronavirus
  REGION 1..15: note = Table B: HLA-DQA1*01:02-B1*06:02L HLA-DRB1*14:01L HLA-DRB1*11:04L HLA-DRB1*11:01L HLA-DPA1*02:01-B1*13:01L HLA-DRB1*15:03L
  source 1..15: note = Severe acute respiratory syndrome coronavirus 2
DKAGQKTYERHSLSH

SEQ ID NO: 17905 - protein, 12 aa, Severe acute respiratory syndrome-related coronavirus
  REGION 1..12: note = Table B: HLA-DQA1*01:02-B1*06:02L
  source 1..12: note = Severe acute respiratory syndrome coronavirus 2
SLSHFVNLDNLR

SEQ ID NO: 17906 - protein, 13 aa, Severe acute respiratory syndrome-related coronavirus
  REGION 1..13: note = Table B: HLA-DQA1*01:02-B1*06:02L HLA-DRB1*14:01L
  source 1..13: note = Severe acute respiratory syndrome coronavirus 2
LRANNTKGSLPIN

SEQ ID NO: 17907 - protein, 10 aa, Severe acute respiratory syndrome-related coronavirus
  REGION 1..10: note = Table B: HLA-DQA1*01:02-B1*06:02L HLA-DRB1*14:02L HLA-DQA1*05:05-B1*03:19L HLA-DPA1*02:01-B1*13:01L HLA-DPA1*03:01-B1*105:01L HLA-DQA1*01:03-B1*06:01L HLA-DQA1*02:01-B1*03:03L HLA-DRB1*15:03L
  source 1..10: note = Severe acute respiratory syndrome coronavirus 2
GSLPINVIVF

SEQ ID NO: 17908 - protein, 12 aa, Severe acute respiratory syndrome-related coronavirus
  REGION 1..12: note = Table B: HLA-DQA1*01:02-B1*06:02L HLA-DRB1*01:02L
  source 1..12: note = Severe acute respiratory syndrome coronavirus 2
PINVIVFDGKSK

SEQ ID NO: 17909 - protein, 12 aa, Severe acute respiratory syndrome-related coronavirus
  REGION 1..12: note = Table B: HLA-DQA1*01:02-B1*06:02L HLA-DQA1*01:03-B1*06:01L
  source 1..12: note = Severe acute respiratory syndrome coronavirus 2
DGKSKCEESSAK

SEQ ID NO: 17910 - protein, 14 aa, Severe acute respiratory syndrome-related coronavirus
  REGION 1..14: note = Table B: HLA-DQA1*01:02-B1*06:02L HLA-DPA1*03:01-B1*105:01L
  source 1..14: note = Severe acute respiratory syndrome coronavirus 2
SASVYYSQLMCQPI

SEQ ID NO: 17911 - protein, 12 aa, Severe acute respiratory syndrome-related coronavirus
  REGION 1..12: note = Table B: HLA-DQA1*01:02-B1*06:02L HLA-DRB1*01:02L HLA-DPA1*03:01-B1*04:02L HLA-DQA1*05:05-B1*03:19L HLA-DRB1*12:01L HLA-DPA1*03:01-B1*105:01L HLA-DQA1*05:05-B1*03:01L HLA-DRB1*15:03L
  source 1..12: note = Severe acute respiratory syndrome coronavirus 2
VYYSQLMCQPIL

SEQ ID NO: 17912 - protein, 12 aa, Severe acute respiratory syndrome-related coronavirus
  REGION 1..12: note = Table B: HLA-DQA1*01:02-B1*06:02L HLA-DPA1*03:01-B1*105:01L
  source 1..12: note = Severe acute respiratory syndrome coronavirus 2
QLMCQPILLLDQ

SEQ ID NO: 17913 - protein, 12 aa, Severe acute respiratory syndrome-related coronavirus
  REGION 1..12: note = Table B: HLA-DQA1*01:02-B1*06:02L HLA-DPA1*03:01-B1*105:01L
  source 1..12: note = Severe acute respiratory syndrome coronavirus 2
LMCQPILLLDQA

SEQ ID NO: 17914 - protein, 12 aa, Severe acute respiratory syndrome-related coronavirus
  REGION 1..12: note = Table B: HLA-DQA1*01:02-B1*06:02L
  source 1..12: note = Severe acute respiratory syndrome coronavirus 2
TFNVPMEKLKTL

SEQ ID NO: 17915 - protein, 14 aa, Severe acute respiratory syndrome-related coronavirus
  REGION 1..14: note = Table B: HLA-DQA1*01:02-B1*06:02L
  source 1..14: note = Severe acute respiratory syndrome coronavirus 2
FNVPMEKLKTLVAT

SEQ ID NO: 17916 - protein, 13 aa, Severe acute respiratory syndrome-related coronavirus
  REGION 1..13: note = Table B: HLA-DQA1*01:02-B1*06:02L HLA-DRB1*01:02L
  source 1..13: note = Severe acute respiratory syndrome coronavirus 2
KLKTLVATAEAEL

SEQ ID NO: 17917 - protein, 13 aa, Severe acute respiratory syndrome-related coronavirus
  REGION 1..13: note = Table B: HLA-DQA1*01:02-B1*06:02L HLA-DRB1*01:02L HLA-DQA1*05:05-B1*03:19L HLA-DQA1*05:05-B1*03:01L
  source 1..13: note = Severe acute respiratory syndrome coronavirus 2
LKTLVATAEAELA

SEQ ID NO: 17918 - protein, 12 aa, Severe acute respiratory syndrome-related coronavirus
  REGION 1..12: note = Table B: HLA-DQA1*01:02-B1*06:02L HLA-DRB1*14:01L HLA-DRB1*12:01L HLA-DPA1*03:01-B1*105:01L HLA-DRB1*16:01L HLA-DRB1*15:03L
  source 1..12: note = Severe acute respiratory syndrome coronavirus 2
ELAKNVSLDNVL

SEQ ID NO: 17919 - protein, 11 aa, Severe acute respiratory syndrome-related coronavirus
  REGION 1..11: note = Table B: HLA-DQA1*01:02-B1*06:02L
  source 1..11: note = Severe acute respiratory syndrome coronavirus 2
VLSTFISAARQ

SEQ ID NO: 17920 - protein, 14 aa, Severe acute respiratory syndrome-related coronavirus
  REGION 1..14: note = Table B: HLA-DQA1*01:02-B1*06:02L HLA-DRB1*08:01L HLA-DRB3*01:01L HLA-DPA1*01:02-B1*04:01L
  source 1..14: note = Severe acute respiratory syndrome coronavirus 2
ARQGFVDSDVETKD

SEQ ID NO: 17921 - protein, 12 aa, Severe acute respiratory syndrome-related coronavirus
  REGION 1..12: note = Table B: HLA-DQA1*01:02-B1*06:02L HLA-DPA1*01:03-B1*03:01L HLA-DPA1*02:01-B1*13:01L HLA-DRB1*15:03L
  source 1..12: note = Severe acute respiratory syndrome coronavirus 2
FVDSDVETKDVV

SEQ ID NO: 17922 - protein, 12 aa, Severe acute respiratory syndrome-related coronavirus
  REGION 1..12: note = Table B: HLA-DQA1*01:02-B1*06:02L HLA-DQA1*01:03-B1*06:01L
  source 1..12: note = Severe acute respiratory syndrome coronavirus 2
DVETKDVVECLK

SEQ ID NO: 17923 - protein, 12 aa, Severe acute respiratory syndrome-related coronavirus
  REGION 1..12: note = Table B: HLA-DQA1*01:02-B1*06:02L HLA-DRB1*14:01L HLA-DRB1*08:01L
  source 1..12: note = Severe acute respiratory syndrome coronavirus 2
KDVVECLKLSHQ

SEQ ID NO: 17924 - protein, 12 aa, Severe acute respiratory syndrome-related coronavirus
  REGION 1..12: note = Table B: HLA-DQA1*01:02-B1*06:02L
  source 1..12: note = Severe acute respiratory syndrome coronavirus 2
DVVECLKLSHQS

SEQ ID NO: 17925 - protein, 12 aa, Severe acute respiratory syndrome-related coronavirus
  REGION 1..12: note = Table B: HLA-DQA1*01:02-B1*06:02L HLA-DQA1*01:03-B1*06:01L
  source 1..12: note = Severe acute respiratory syndrome coronavirus 2
VVECLKLSHQSD

SEQ ID NO: 17926 - protein, 13 aa, Severe acute respiratory syndrome-related coronavirus
  REGION 1..13: note = Table B: HLA-DQA1*01:02-B1*06:02L
  source 1..13: note = Severe acute respiratory syndrome coronavirus 2
VECLKLSHQSDIE

SEQ ID NO: 17927 - protein, 15 aa, Severe acute respiratory syndrome-related coronavirus
  REGION 1..15: note = Table B: HLA-DQA1*01:02-B1*06:02L
  source 1..15: note = Severe acute respiratory syndrome coronavirus 2
VTGDSCNNYMLTYNK

SEQ ID NO: 17928 - protein, 14 aa, Severe acute respiratory syndrome-related coronavirus
  REGION 1..14: note = Table B: HLA-DQA1*01:02-B1*06:02L HLA-DPA1*03:01-B1*105:01L
  source 1..14: note = Severe acute respiratory syndrome coronavirus 2
DSCNNYMLTYNKVE

SEQ ID NO: 17929 - protein, 13 aa, Severe acute respiratory syndrome-related coronavirus
  REGION 1..13: note = Table B: HLA-DQA1*01:02-B1*06:02L
  source 1..13: note = Severe acute respiratory syndrome coronavirus 2
YMLTYNKVENMTP

SEQ ID NO: 17930 - protein, 12 aa, Severe acute respiratory syndrome-related coronavirus
  REGION 1..12: note = Table B: HLA-DQA1*01:02-B1*06:02L HLA-DRB1*01:02L HLA-DQA1*01-B1*05L HLA-DPA1*03:01-B1*105:01L
  source 1..12: note = Severe acute respiratory syndrome coronavirus 2
TYNKVENMTPRD

SEQ ID NO: 17931 - protein, 11 aa, Severe acute respiratory syndrome-related coronavirus
  REGION 1..11: note = Table B: HLA-DQA1*01:02-B1*06:02L HLA-DQA1*01:03-B1*06:01L
  source 1..11: note = Severe acute respiratory syndrome coronavirus 2
DLGACIDCSAR

SEQ ID NO: 17932 - protein, 12 aa, Severe acute respiratory syndrome-related coronavirus
  REGION 1..12: note = Table B: HLA-DQA1*01:02-B1*06:02L
  source 1..12: note = Severe acute respiratory syndrome coronavirus 2
GACIDCSARHIN

SEQ ID NO: 17933 - protein, 13 aa, Severe acute respiratory syndrome-related coronavirus
  REGION 1..13: note = Table B: HLA-DQA1*01:02-B1*06:02L
  source 1..13: note = Severe acute respiratory syndrome coronavirus 2
ACIDCSARHINAQ

SEQ ID NO: 17934 - protein, 14 aa, Severe acute respiratory syndrome-related coronavirus
  REGION 1..14: note = Table B: HLA-DQA1*01:02-B1*06:02L HLA-DRB1*01:02L
  source 1..14: note = Severe acute respiratory syndrome coronavirus 2
IDCSARHINAQVAK

SEQ ID NO: 17935 - protein, 11 aa, Severe acute respiratory syndrome-related coronavirus
  REGION 1..11: note = Table B: HLA-DQA1*01:02-B1*06:02L HLA-DQA1*02:01-B1*03:03L
  source 1..11: note = Severe acute respiratory syndrome coronavirus 2
VAKSHNIALIW

SEQ ID NO: 17936 - protein, 12 aa, Severe acute respiratory syndrome-related coronavirus
  REGION 1..12: note = Table B: HLA-DQA1*01:02-B1*06:02L
  source 1..12: note = Severe acute respiratory syndrome coronavirus 2
KSHNIALIWNVK

SEQ ID NO: 17937 - protein, 12 aa, Severe acute respiratory syndrome-related coronavirus
  REGION 1..12: note = Table B: HLA-DQA1*01:02-B1*06:02L
  source 1..12: note = Severe acute respiratory syndrome coronavirus 2
MSLSEQLRKQIR

SEQ ID NO: 17938 - protein, 14 aa, Severe acute respiratory syndrome-related coronavirus
  REGION 1..14: note = Table B: HLA-DQA1*01:02-B1*06:02L HLA-DRB1*08:04L HLA-DRB1*11:04L HLA-DRB1*11:01L HLA-DRB3*01:01L
  source 1..14: note = Severe acute respiratory syndrome coronavirus 2
RKQIRSAAKKNNLP

SEQ ID NO: 17939 - protein, 10 aa, Severe acute respiratory syndrome-related coronavirus
  REGION 1..10: note = Table B: HLA-DQA1*01:02-B1*06:02L HLA-DQA1*02:01-B1*03:03L
  source 1..10: note = Severe acute respiratory syndrome coronavirus 2
SAAKKNNLPF

SEQ ID NO: 17940 - protein, 16 aa, Severe acute respiratory syndrome-related coronavirus
  REGION 1..16: note = Table B: HLA-DQA1*01:02-B1*06:02L
  source 1..16: note = Severe acute respiratory syndrome coronavirus 2
AAKKNNLPFKLTCATT

SEQ ID NO: 17941 - protein, 14 aa, Severe acute respiratory syndrome-related coronavirus
  REGION 1..14: note = Table B: HLA-DQA1*01:02-B1*06:02L
  source 1..14: note = Severe acute respiratory syndrome coronavirus 2
NNLPFKLTCATTRQ

SEQ ID NO: 17942 - protein, 14 aa, Severe acute respiratory syndrome-related coronavirus
  REGION 1..14: note = Table B: HLA-DQA1*01:02-B1*06:02L HLA-DQA1*01:03-B1*06:01L
  source 1..14: note = Severe acute respiratory syndrome coronavirus 2
LPFKLTCATTRQVV

SEQ ID NO: 17943 - protein, 10 aa, Severe acute respiratory syndrome-related coronavirus
  REGION 1..10: note = Table B: HLA-DQA1*01:02-B1*06:02L HLA-DQA1*01:03-B1*06:01L
  source 1..10: note = Severe acute respiratory syndrome coronavirus 2
TCATTRQVVN

SEQ ID NO: 17944 - protein, 12 aa, Severe acute respiratory syndrome-related coronavirus
  REGION 1..12: note = Table B: HLA-DQA1*01:02-B1*06:02L
  source 1..12: note = Severe acute respiratory syndrome coronavirus 2
VVNVVTTKIALK

SEQ ID NO: 17945 - protein, 12 aa, Severe acute respiratory syndrome-related coronavirus
  REGION 1..12: note = Table B: HLA-DQA1*01:02-B1*06:02L
  source 1..12: note = Severe acute respiratory syndrome coronavirus 2
NVVTTKIALKGG

SEQ ID NO: 17946 - protein, 14 aa, Severe acute respiratory syndrome-related coronavirus
  REGION 1..14: note = Table B: HLA-DQA1*01:02-B1*06:02L HLA-DRB3*02:01L HLA-DPA1*01:03-B1*03:01L HLA-DPA1*02:01-B1*13:01L HLA-DPA1*03:01-B1*105:01L HLA-DPA1*01:02-B1*04:01L HLA-DQA1*01:03-B1*06:01L
  source 1..14: note = Severe acute respiratory syndrome coronavirus 2
VTTKIALKGGKIVN

SEQ ID NO: 17947 - protein, 10 aa, Severe acute respiratory syndrome-related coronavirus
  REGION 1..10: note = Table B: HLA-DQA1*01:02-B1*06:02L HLA-DQA1*01:03-B1*06:01L HLA-DQA1*02:01-B1*03:03L
  source 1..10: note = Severe acute respiratory syndrome coronavirus 2
LKGGKIVNNW

SEQ ID NO: 17948 - protein, 13 aa, Severe acute respiratory syndrome-related coronavirus
  REGION 1..13: note = Table B: HLA-DQA1*01:02-B1*06:02L HLA-DPA1*03:01-B1*105:01L
  source 1..13: note = Severe acute respiratory syndrome coronavirus 2
IVNNWLKQLIKVT

SEQ ID NO: 17949 - protein, 10 aa, Severe acute respiratory syndrome-related coronavirus
  REGION 1..10: note = Table B: HLA-DQA1*01:02-B1*06:02L
  source 1..10: note = Severe acute respiratory syndrome coronavirus 2
WLKQLIKVTL

SEQ ID NO: 17950 - protein, 12 aa, Severe acute respiratory syndrome-related coronavirus
  REGION 1..12: note = Table B: HLA-DQA1*01:02-B1*06:02L HLA-DQA1*01:03-B1*06:01L HLA-DRB1*04:08L
  source 1..12: note = Severe acute respiratory syndrome coronavirus 2
YLITPVHVMSKH

SEQ ID NO: 17951 - protein, 12 aa, Severe acute respiratory syndrome-related coronavirus
  REGION 1..12: note = Table B: HLA-DQA1*01:02-B1*06:02L HLA-DRB1*01:02L HLA-DRB1*16:01L HLA-DQA1*01:03-B1*06:01L HLA-DRB1*15:03L
  source 1..12: note = Severe acute respiratory syndrome coronavirus 2
LITPVHVMSKHT

SEQ ID NO: 17952 - protein, 12 aa, Severe acute respiratory syndrome-related coronavirus
  REGION 1..12: note = Table B: HLA-DQA1*01:02-B1*06:02L HLA-DRB1*08:04L HLA-DRB1*11:04L HLA-DRB1*11:01L HLA-DRB1*04:08L
  source 1..12: note = Severe acute respiratory syndrome coronavirus 2
TPVHVMSKHTDF

SEQ ID NO: 17953 - protein, 12 aa, Severe acute respiratory syndrome-related coronavirus
  REGION 1..12: note = Table B: HLA-DQA1*01:02-B1*06:02L HLA-DRB1*08:04L HLA-DRB1*08:01L
  source 1..12: note = Severe acute respiratory syndrome coronavirus 2
PVHVMSKHTDFS

SEQ ID NO: 17954 - protein, 13 aa, Severe acute respiratory syndrome-related coronavirus
  REGION 1..13: note = Table B: HLA-DQA1*01:02-B1*06:02L
  source 1..13: note = Severe acute respiratory syndrome coronavirus 2
MSKHTDFSSEIIG

SEQ ID NO: 17955 - protein, 12 aa, Severe acute respiratory syndrome-related coronavirus
  REGION 1..12: note = Table B: HLA-DQA1*01:02-B1*06:02L
  source 1..12: note = Severe acute respiratory syndrome coronavirus 2
FSSEIIGYKAID

SEQ ID NO: 17956 - protein, 12 aa, Severe acute respiratory syndrome-related coronavirus
  REGION 1..12: note = Table B: HLA-DQA1*01:02-B1*06:02L HLA-DRB1*01:02L HLA-DRB1*12:01L HLA-DPA1*03:01-B1*105:01L
  source 1..12: note = Severe acute respiratory syndrome coronavirus 2
EIIGYKAIDGGV

SEQ ID NO: 17957 - protein, 12 aa, Severe acute respiratory syndrome-related coronavirus
  REGION 1..12: note = Table B: HLA-DQA1*01:02-B1*06:02L HLA-DQA1*01:03-B1*06:01L
  source 1..12: note = Severe acute respiratory syndrome coronavirus 2
STDTCFANKHAD

SEQ ID NO: 17958 - protein, 12 aa, Severe acute respiratory syndrome-related coronavirus
  REGION 1..12: note = Table B: HLA-DQA1*01:02-B1*06:02L HLA-DQA1*01:03-B1*06:01L
  source 1..12: note = Severe acute respiratory syndrome coronavirus 2
TDTCFANKHADF

SEQ ID NO: 17959 - protein, 12 aa, Severe acute respiratory syndrome-related coronavirus
  REGION 1..12: note = Table B: HLA-DQA1*01:02-B1*06:02L HLA-DRB1*08:01L HLA-DQA1*01:03-B1*06:01L
  source 1..12: note = Severe acute respiratory syndrome coronavirus 2
DTCFANKHADFD

SEQ ID NO: 17960 - protein, 10 aa, Severe acute respiratory syndrome-related coronavirus
  REGION 1..10: note = Table B: HLA-DQA1*01:02-B1*06:02L HLA-DQA1*02:01-B1*03:03L
  source 1..10: note = Severe acute respiratory syndrome coronavirus 2
ANKHADFDTW

SEQ ID NO: 17961 - protein, 15 aa, Severe acute respiratory syndrome-related coronavirus
  REGION 1..15: note = Table B: HLA-DQA1*01:02-B1*06:02L HLA-DPA1*02:01-B1*13:01L
  source 1..15: note = Severe acute respiratory syndrome coronavirus 2
NKHADFDTWFSQRGG

SEQ ID NO: 17962 - protein, 13 aa, Severe acute respiratory syndrome-related coronavirus
  REGION 1..13: note = Table B: HLA-DQA1*01:02-B1*06:02L HLA-DQA1*05:05-B1*03:01L
  source 1..13: note = Severe acute respiratory syndrome coronavirus 2
WFSQRGGSYTNDK

SEQ ID NO: 17963 - protein, 13 aa, Severe acute respiratory syndrome-related coronavirus
  REGION 1..13: note = Table B: HLA-DQA1*01:02-B1*06:02L HLA-DQA1*05:05-B1*03:01L HLA-DQA1*01:03-B1*06:01L
  source 1..13: note = Severe acute respiratory syndrome coronavirus 2
FSQRGGSYTNDKA

SEQ ID NO: 17964 - protein, 14 aa, Severe acute respiratory syndrome-related coronavirus
  REGION 1..14: note = Table B: HLA-DQA1*01:02-B1*06:02L
  source 1..14: note = Severe acute respiratory syndrome coronavirus 2
YTNDKACPLIAAVI

SEQ ID NO: 17965 - protein, 10 aa, Severe acute respiratory syndrome-related coronavirus
  REGION 1..10: note = Table B: HLA-DQA1*01:02-B1*06:02L HLA-DPA1*03:01-B1*105:01L HLA-DQA1*01:03-B1*06:01L HLA-DQA1*02:01-B1*03:03L
  source 1..10: note = Severe acute respiratory syndrome coronavirus 2
AAVITREVGF

SEQ ID NO: 17966 - protein, 13 aa, Severe acute respiratory syndrome-related coronavirus
  REGION 1..13: note = Table B: HLA-DQA1*01:02-B1*06:02L
  source 1..13: note = Severe acute respiratory syndrome coronavirus 2
TREVGFVVPGLPG

SEQ ID NO: 17967 - protein, 13 aa, Severe acute respiratory syndrome-related coronavirus
  REGION 1..13: note = Table B: HLA-DQA1*01:02-B1*06:02L HLA-DQA1*05:05-B1*03:01L
  source 1..13: note = Severe acute respiratory syndrome coronavirus 2
VPGLPGTILRTTN

SEQ ID NO: 17968 - protein, 12 aa, Severe acute respiratory syndrome-related coronavirus
  REGION 1..12: note = Table B: HLA-DQA1*01:02-B1*06:02L HLA-DQA1*03:01-B1*03:02L HLA-DQA1*02:01-B1*03:03L
  source 1..12: note = Severe acute respiratory syndrome coronavirus 2
LPGTILRTTNGD

SEQ ID NO: 17969 - protein, 10 aa, Severe acute respiratory syndrome-related coronavirus
  REGION 1..10: note = Table B: HLA-DQA1*01:02-B1*06:02L HLA-DQA1*05:05-B1*03:19L HLA-DQA1*05:01-B1*02:01L HLA-DRB4*01:01L HLA-DPA1*01:03-B1*04:01L HLA-DPA1*02:01-B1*13:01L HLA-DQA1*01:03-B1*06:01L
  source 1..10: note = Severe acute respiratory syndrome coronavirus 2
VFSAVGNICY

SEQ ID NO: 17970 - protein, 12 aa, Severe acute respiratory syndrome-related coronavirus
  REGION 1..12: note = Table B: HLA-DQA1*01:02-B1*06:02L HLA-DQA1*01:03-B1*06:01L HLA-DQA1*02:01-B1*03:03L
  source 1..12: note = Severe acute respiratory syndrome coronavirus 2
SAVGNICYTPSK

SEQ ID NO: 17971 - protein, 11 aa, Severe acute respiratory syndrome-related coronavirus
  REGION 1..11: note = Table B: HLA-DQA1*01:02-B1*06:02L HLA-DPA1*01:03-B1*03:01L HLA-DRB1*03:01L HLA-DRB1*14:02L HLA-DQA1*01-B1*05L HLA-DRB4*01:01L HLA-DPA1*01:03-B1*04:01L HLA-DPA1*01:03-B1*04:02L HLA-DPA1*02:01-B1*13:01L
  REGION 1..11: note = CONT. FROM ABOVE: HLA-DPA1*03:01-B1*105:01L HLA-DPA1*01:03-B1*10 4:01L HLA-DQA1*05:05-B1*03:01L HLA-DQA1*01:03-B1*06:01L
  source 1..11: note = Severe acute respiratory syndrome coronavirus 2
ICYTPSKLIEY

SEQ ID NO: 17972 - protein, 12 aa, Severe acute respiratory syndrome-related coronavirus
  REGION 1..12: note = Table B: HLA-DQA1*01:02-B1*06:02L HLA-DPA1*03:01-B1*04:02L HLA-DQA1*05:01-B1*02:01L HLA-DRB1*12:01L HLA-DPA1*03:01-B1*105:01L HLA-DPA1*01:02-B1*04:01L HLA-DRB1*15:03L
  source 1..12: note = Severe acute respiratory syndrome coronavirus 2
YTPSKLIEYTDF

SEQ ID NO: 17973 - protein, 14 aa, Severe acute respiratory syndrome-related coronavirus
  REGION 1..14: note = Table B: HLA-DQA1*01:02-B1*06:02L HLA-DQA1*05:05-B1*03:01L
  source 1..14: note = Severe acute respiratory syndrome coronavirus 2
IEYTDFATSACVLA

SEQ ID NO: 17974 - protein, 11 aa, Severe acute respiratory syndrome-related coronavirus
  REGION 1..11: note = Table B: HLA-DQA1*01:02-B1*06:02L HLA-DQA1*01:03-B1*06:01L
  source 1..11: note = Severe acute respiratory syndrome coronavirus 2
FATSACVLAAE

SEQ ID NO: 17975 - protein, 12 aa, Severe acute respiratory syndrome-related coronavirus
  REGION 1..12: note = Table B: HLA-DQA1*01:02-B1*06:02L HLA-DQA1*01:03-B1*06:01L
  source 1..12: note = Severe acute respiratory syndrome coronavirus 2
ATSACVLAAECT

SEQ ID NO: 17976 - protein, 14 aa, Severe acute respiratory syndrome-related coronavirus
  REGION 1..14: note = Table B: HLA-DQA1*01:02-B1*06:02L
  source 1..14: note = Severe acute respiratory syndrome coronavirus 2
TSACVLAAECTIFK

SEQ ID NO: 17977 - protein, 10 aa, Severe acute respiratory syndrome-related coronavirus
  REGION 1..10: note = Table B: HLA-DQA1*01:02-B1*06:02L HLA-DQA1*01:03-B1*06:01L
  source 1..10: note = Severe acute respiratory syndrome coronavirus 2
AAECTIFKDA

SEQ ID NO: 17978 - protein, 10 aa, Severe acute respiratory syndrome-related coronavirus
  REGION 1..10: note = Table B: HLA-DQA1*01:02-B1*06:02L HLA-DQA1*05:05-B1*03:19L HLA-DQA1*05:05-B1*03:01L HLA-DQA1*01:03-B1*06:01L
  source 1..10: note = Severe acute respiratory syndrome coronavirus 2
DASGKPVPYC

SEQ ID NO: 17979 - protein, 10 aa, Severe acute respiratory syndrome-related coronavirus
  REGION 1..10: note = Table B: HLA-DQA1*01:02-B1*06:02L HLA-DQA1*05:05-B1*03:19L
  source 1..10: note = Severe acute respiratory syndrome coronavirus 2
ASGKPVPYCY

SEQ ID NO: 17980 - protein, 12 aa, Severe acute respiratory syndrome-related coronavirus
  REGION 1..12: note = Table B: HLA-DQA1*01:02-B1*06:02L
  source 1..12: note = Severe acute respiratory syndrome coronavirus 2
SGKPVPYCYDTN

SEQ ID NO: 17981 - protein, 12 aa, Severe acute respiratory syndrome-related coronavirus
  REGION 1..12: note = Table B: HLA-DQA1*01:02-B1*06:02L
  source 1..12: note = Severe acute respiratory syndrome coronavirus 2
CYDTNVLEGSVA

SEQ ID NO: 17982 - protein, 11 aa, Severe acute respiratory syndrome-related coronavirus
  REGION 1..11: note = Table B: HLA-DQA1*01:02-B1*06:02L
  source 1..11: note = Severe acute respiratory syndrome coronavirus 2
EGSVAYESLRP

SEQ ID NO: 17983 - protein, 11 aa, Severe acute respiratory syndrome-related coronavirus
  REGION 1..11: note = Table B: HLA-DQA1*01:02-B1*06:02L
  source 1..11: note = Severe acute respiratory syndrome coronavirus 2
SVAYESLRPDT

SEQ ID NO: 17984 - protein, 11 aa, Severe acute respiratory syndrome-related coronavirus
  REGION 1..11: note = Table B: HLA-DQA1*01:02-B1*06:02L HLA-DRB1*01:02L HLA-DQA1*01:01-B1*05:01L HLA-DRB1*08:01L HLA-DRB1*12:01L HLA-DQA1*05:05-B1*03:01L HLA-DRB1*04:08L
  source 1..11: note = Severe acute respiratory syndrome coronavirus 2
VAYESLRPDTR

SEQ ID NO: 17985 - protein, 14 aa, Severe acute respiratory syndrome-related coronavirus
  REGION 1..14: note = Table B: HLA-DQA1*01:02-B1*06:02L
  source 1..14: note = Severe acute respiratory syndrome coronavirus 2
LRPDTRYVLMDGSI

SEQ ID NO: 17986 - protein, 14 aa, Severe acute respiratory syndrome-related coronavirus
  REGION 1..14: note = Table B: HLA-DQA1*01:02-B1*06:02L HLA-DPA1*02:01-B1*13:01L HLA-DRB1*16:01L
  source 1..14: note = Severe acute respiratory syndrome coronavirus 2
RPDTRYVLMDGSII

SEQ ID NO: 17987 - protein, 10 aa, Severe acute respiratory syndrome-related coronavirus
  REGION 1..10: note = Table B: HLA-DQA1*01:02-B1*06:02L HLA-DQA1*02:01-B1*03:03L
  source 1..10: note = Severe acute respiratory syndrome coronavirus 2
EGSVRVVTTF

SEQ ID NO: 17988 - protein, 12 aa, Severe acute respiratory syndrome-related coronavirus
  REGION 1..12: note = Table B: HLA-DQA1*01:02-B1*06:02L
  source 1..12: note = Severe acute respiratory syndrome coronavirus 2
DSEYCRHGTCER

SEQ ID NO: 17989 - protein, 13 aa, Severe acute respiratory syndrome-related coronavirus
  REGION 1..13: note = Table B: HLA-DQA1*01:02-B1*06:02L
  source 1..13: note = Severe acute respiratory syndrome coronavirus 2
YCRHGTCERSEAG

SEQ ID NO: 17990 - protein, 11 aa, Severe acute respiratory syndrome-related coronavirus
  REGION 1..11: note = Table B: HLA-DQA1*01:02-B1*06:02L HLA-DQA1*05:05-B1*03:01L HLA-DQA1*01:03-B1*06:01L
  source 1..11: note = Severe acute respiratory syndrome coronavirus 2
EAGVCVSTSGR

SEQ ID NO: 17991 - protein, 12 aa, Severe acute respiratory syndrome-related coronavirus
  REGION 1..12: note = Table B: HLA-DQA1*01:02-B1*06:02L
  source 1..12: note = Severe acute respiratory syndrome coronavirus 2
AGVCVSTSGRWV

SEQ ID NO: 17992 - protein, 12 aa, Severe acute respiratory syndrome-related coronavirus
  REGION 1..12: note = Table B: HLA-DQA1*01:02-B1*06:02L HLA-DQA1*02:01-B1*03:03L
  source 1..12: note = Severe acute respiratory syndrome coronavirus 2
VSTSGRWVLNND

SEQ ID NO: 17993 - protein, 11 aa, Severe acute respiratory syndrome-related coronavirus
  REGION 1..11: note = Table B: HLA-DQA1*01:02-B1*06:02L HLA-DQA1*05:01-B1*02:01L
  source 1..11: note = Severe acute respiratory syndrome coronavirus 2
TSGRWVLNNDY

SEQ ID NO: 17994 - protein, 10 aa, Severe acute respiratory syndrome-related coronavirus
  REGION 1..10: note = Table B: HLA-DQA1*01:02-B1*06:02L HLA-DPA1*01:03-B1*03:01L HLA-DQA1*05:05-B1*03:19L HLA-DQA1*05:01-B1*02:01L HLA-DRB1*16:01L HLA-DQA1*02:01-B1*03:03L
  source 1..10: note = Severe acute respiratory syndrome coronavirus 2
GRWVLNNDYY

SEQ ID NO: 17995 - protein, 14 aa, Severe acute respiratory syndrome-related coronavirus
  REGION 1..14: note = Table B: HLA-DQA1*01:02-B1*06:02L HLA-DPA1*03:01-B1*105:01L HLA-DQA1*01:03-B1*06:01L
  source 1..14: note = Severe acute respiratory syndrome coronavirus 2
RSLPGVFCGVDAVN

SEQ ID NO: 17996 - protein, 13 aa, Severe acute respiratory syndrome-related coronavirus
  REGION 1..13: note = Table B: HLA-DQA1*01:02-B1*06:02L HLA-DQA1*01-B1*05L HLA-DQA1*05:01-B1*02:01L HLA-DPA1*03:01-B1*105:01L HLA-DRB1*16:01L HLA-DQA1*01:03-B1*06:01L HLA-DRB1*04:08L
  source 1..13: note = Severe acute respiratory syndrome coronavirus 2
VNLLTNMFTPLIQ

SEQ ID NO: 17997 - protein, 13 aa, Severe acute respiratory syndrome-related coronavirus
  REGION 1..13: note = Table B: HLA-DQA1*01:02-B1*06:02L
  source 1..13: note = Severe acute respiratory syndrome coronavirus 2
LLTNMFTPLIQPI

SEQ ID NO: 17998 - protein, 13 aa, Severe acute respiratory syndrome-related coronavirus
  REGION 1..13: note = Table B: HLA-DQA1*01:02-B1*06:02L
  source 1..13: note = Severe acute respiratory syndrome coronavirus 2
QPIGALDISASIV

SEQ ID NO: 17999 - protein, 15 aa, Severe acute respiratory syndrome-related coronavirus
  REGION 1..15: note = Table B: HLA-DQA1*01:02-B1*06:02L
  source 1..15: note = Severe acute respiratory syndrome coronavirus 2
PIGALDISASIVAGG

SEQ ID NO: 18000 - protein, 11 aa, Severe acute respiratory syndrome-related coronavirus
  REGION 1..11: note = Table B: HLA-DQA1*01:02-B1*06:02L HLA-DQA1*01:03-B1*06:01L
  source 1..11: note = Severe acute respiratory syndrome coronavirus 2
DISASIVAGGI

SEQ ID NO: 18001 - protein, 11 aa, Severe acute respiratory syndrome-related coronavirus
  REGION 1..11: note = Table B: HLA-DQA1*01:02-B1*06:02L
  source 1..11: note = Severe acute respiratory syndrome coronavirus 2
IVAGGIVAIVV

SEQ ID NO: 18002 - protein, 11 aa, Severe acute respiratory syndrome-related coronavirus
  REGION 1..11: note = Table B: HLA-DQA1*01:02-B1*06:02L
  source 1..11: note = Severe acute respiratory syndrome coronavirus 2
VVTCLAYYFMR

SEQ ID NO: 18003 - protein, 13 aa, Severe acute respiratory syndrome-related coronavirus
  REGION 1..13: note = Table B: HLA-DQA1*01:02-B1*06:02L
  source 1..13: note = Severe acute respiratory syndrome coronavirus 2
YYFMRFRRAFGEY

SEQ ID NO: 18004 - protein, 10 aa, Severe acute respiratory syndrome-related coronavirus
  REGION 1..10: note = Table B: HLA-DQA1*01:02-B1*06:02L HLA-DQA1*05:05-B1*03:19L HLA-DQA1*05:01-B1*02:01L
  source 1..10: note = Severe acute respiratory syndrome coronavirus 2
FGEYSHVVAF

SEQ ID NO: 18005 - protein, 14 aa, Severe acute respiratory syndrome-related coronavirus
  REGION 1..14: note = Table B: HLA-DQA1*01:02-B1*06:02L HLA-DPA1*01:03-B1*04:02L
  source 1..14: note = Severe acute respiratory syndrome coronavirus 2
LMSFTVLCLTPVYS

SEQ ID NO: 18006 - protein, 14 aa, Severe acute respiratory syndrome-related coronavirus
  REGION 1..14: note = Table B: HLA-DQA1*01:02-B1*06:02L HLA-DRB1*01:02L HLA-DRB1*12:01L HLA-DPA1*03:01-B1*105:01L HLA-DRB1*15:03L
  source 1..14: note = Severe acute respiratory syndrome coronavirus 2
TVLCLTPVYSFLPG

SEQ ID NO: 18007 - protein, 10 aa, Severe acute respiratory syndrome-related coronavirus
  REGION 1..10: note = Table B: HLA-DQA1*01:02-B1*06:02L HLA-DQA1*05:05-B1*03:19L HLA-DQA1*05:01-B1*02:01L HLA-DPA1*01:03-B1*04:01L HLA-DPA1*02:01-B1*13:01L HLA-DPA1*03:01-B1*105:01L HLA-DRB1*16:01L HLA-DQA1*01:03-B1*06:01L
  REGION 1..10: note = CONT. FROM ABOVE: HLA-DQA1*02:01-B1*03:03L HLA-DRB1*15:03L
  source 1..10: note = Severe acute respiratory syndrome coronavirus 2
PVYSFLPGVY

SEQ ID NO: 18008 - protein, 10 aa, Severe acute respiratory syndrome-related coronavirus
  REGION 1..10: note = Table B: HLA-DQA1*01:02-B1*06:02L HLA-DQA1*05:05-B1*03:19L
  source 1..10: note = Severe acute respiratory syndrome coronavirus 2
PGVYSVIYLY

SEQ ID NO: 18009 - protein, 10 aa, Severe acute respiratory syndrome-related coronavirus
  REGION 1..10: note = Table B: HLA-DQA1*01:02-B1*06:02L
  source 1..10: note = Severe acute respiratory syndrome coronavirus 2
SVIYLYLTFY

SEQ ID NO: 18010 - protein, 10 aa, Severe acute respiratory syndrome-related coronavirus
  REGION 1..10: note = Table B: HLA-DQA1*01:02-B1*06:02L HLA-DPA1*03:01-B1*04:02L HLA-DPA1*03:01-B1*105:01L HLA-DPA1*01:02-B1*04:01L HLA-DQA1*01:03-B1*06:01L HLA-DRB1*15:03L
  source 1..10: note = Severe acute respiratory syndrome coronavirus 2
FLAHIQWMVM

SEQ ID NO: 18011 - protein, 13 aa, Severe acute respiratory syndrome-related coronavirus
  REGION 1..13: note = Table B: HLA-DQA1*01:02-B1*06:02L HLA-DPA1*01:02-B1*04:01L
  source 1..13: note = Severe acute respiratory syndrome coronavirus 2
LAHIQWMVMFTPL

SEQ ID NO: 18012 - protein, 14 aa, Severe acute respiratory syndrome-related coronavirus
  REGION 1..14: note = Table B: HLA-DQA1*01:02-B1*06:02L HLA-DPA1*01:03-B1*04:02L HLA-DRB1*12:01L HLA-DPA1*01:02-B1*04:01L
  source 1..14: note = Severe acute respiratory syndrome coronavirus 2
AHIQWMVMFTPLVP

SEQ ID NO: 18013 - protein, 10 aa, Severe acute respiratory syndrome-related coronavirus
  REGION 1..10: note = Table B: HLA-DQA1*01:02-B1*06:02L
  source 1..10: note = Severe acute respiratory syndrome coronavirus 2
MVMFTPLVPF

SEQ ID NO: 18014 - protein, 10 aa, Severe acute respiratory syndrome-related coronavirus
  REGION 1..10: note = Table B: HLA-DQA1*01:02-B1*06:02L HLA-DQA1*05:05-B1*03:116L HLA-DPA1*02:01-B1*13:01L HLA-DPA1*03:01-B1*105:01L HLA-DRB1*15:03L
  source 1..10: note = Severe acute respiratory syndrome coronavirus 2
TPLVPFWITI

SEQ ID NO: 18015 - protein, 12 aa, Severe acute respiratory syndrome-related coronavirus
  REGION 1..12: note = Table B: HLA-DQA1*01:02-B1*06:02L HLA-DPA1*03:01-B1*105:01L HLA-DQA1*01:03-B1*06:01L
  source 1..12: note = Severe acute respiratory syndrome coronavirus 2
ITIAYIICISTK

SEQ ID NO: 18016 - protein, 10 aa, Severe acute respiratory syndrome-related coronavirus
  REGION 1..10: note = Table B: HLA-DQA1*01:02-B1*06:02L HLA-DRB1*12:01L HLA-DQA1*01:03-B1*06:01L HLA-DRB1*15:03L
  source 1..10: note = Severe acute respiratory syndrome coronavirus 2
YIICISTKHF

SEQ ID NO: 18017 - protein, 10 aa, Severe acute respiratory syndrome-related coronavirus
  REGION 1..10: note = Table B: HLA-DQA1*01:02-B1*06:02L HLA-DPA1*01:03-B1*03:01L HLA-DRB1*03:01L HLA-DRB1*14:01L HLA-DRB1*14:02L HLA-DQA1*05:05-B1*03:19L HLA-DQA1*05:01-B1*02:01L HLA-DRB1*12:01L HLA-DPA1*03:01-B1*105:01L HLA-DRB1*16:01L
  REGION 1..10: note = CONT. FROM ABOVE: HLA-DQA1*01:03-B1*06:01L HLA-DQA1*02:01-B1*03: 03L HLA-DRB1*15:03L
  source 1..10: note = Severe acute respiratory syndrome coronavirus 2
IICISTKHFY

SEQ ID NO: 18018 - protein, 10 aa, Severe acute respiratory syndrome-related coronavirus
  REGION 1..10: note = Table B: HLA-DQA1*01:02-B1*06:02L HLA-DQA1*05:05-B1*03:19L HLA-DQA1*05:01-B1*02:01L HLA-DPA1*02:01-B1*13:01L HLA-DQA1*01:03-B1*06:01L HLA-DQA1*02:01-B1*03:03L
  source 1..10: note = Severe acute respiratory syndrome coronavirus 2
KHFYWFFSNY

SEQ ID NO: 18019 - protein, 13 aa, Severe acute respiratory syndrome-related coronavirus
  REGION 1..13: note = Table B: HLA-DQA1*01:02-B1*06:02L HLA-DRB1*14:01L HLA-DPA1*03:01-B1*105:01L
  source 1..13: note = Severe acute respiratory syndrome coronavirus 2
YWFFSNYLKRRVV

SEQ ID NO: 18020 - protein, 14 aa, Severe acute respiratory syndrome-related coronavirus
  REGION 1..14: note = Table B: HLA-DQA1*01:02-B1*06:02L
  source 1..14: note = Severe acute respiratory syndrome coronavirus 2
WFFSNYLKRRVVFN

SEQ ID NO: 18021 - protein, 12 aa, Severe acute respiratory syndrome-related coronavirus
  REGION 1..12: note = Table B: HLA-DQA1*01:02-B1*06:02L HLA-DQA1*05:01-B1*02:01L HLA-DPA1*01:03-B1*04:02L HLA-DRB1*16:01L
  source 1..12: note = Severe acute respiratory syndrome coronavirus 2
NGVSFSTFEEAA

SEQ ID NO: 18022 - protein, 10 aa, Severe acute respiratory syndrome-related coronavirus
  REGION 1..10: note = Table B: HLA-DQA1*01:02-B1*06:02L HLA-DPA1*02:01-B1*13:01L HLA-DQA1*01:03-B1*06:01L HLA-DRB1*15:03L
  source 1..10: note = Severe acute respiratory syndrome coronavirus 2
TFEEAALCTF

SEQ ID NO: 18023 - protein, 12 aa, Severe acute respiratory syndrome-related coronavirus
  REGION 1..12: note = Table B: HLA-DQA1*01:02-B1*06:02L HLA-DQA1*01:03-B1*06:01L
  source 1..12: note = Severe acute respiratory syndrome coronavirus 2
EEAALCTFLLNK

SEQ ID NO: 18024 - protein, 10 aa, Severe acute respiratory syndrome-related coronavirus
  REGION 1..10: note = Table B: HLA-DQA1*01:02-B1*06:02L HLA-DPA1*03:01-B1*105:01L HLA-DPA1*01:02-B1*04:01L HLA-DQA1*01:03-B1*06:01L
  source 1..10: note = Severe acute respiratory syndrome coronavirus 2
ALCTFLLNKE

SEQ ID NO: 18025 - protein, 12 aa, Severe acute respiratory syndrome-related coronavirus
  REGION 1..12: note = Table B: HLA-DQA1*01:02-B1*06:02L HLA-DRB1*08:01L
  source 1..12: note = Severe acute respiratory syndrome coronavirus 2
FLLNKEMYLKLR

SEQ ID NO: 18026 - protein, 13 aa, Severe acute respiratory syndrome-related coronavirus
  REGION 1..13: note = Table B: HLA-DQA1*01:02-B1*06:02L HLA-DPA1*01:03-B1*04:02L
  source 1..13: note = Severe acute respiratory syndrome coronavirus 2
LLNKEMYLKLRSD

SEQ ID NO: 18027 - protein, 14 aa, Severe acute respiratory syndrome-related coronavirus
  REGION 1..14: note = Table B: HLA-DQA1*01:02-B1*06:02L
  source 1..14: note = Severe acute respiratory syndrome coronavirus 2
LNKEMYLKLRSDVL

SEQ ID NO: 18028 - protein, 11 aa, Severe acute respiratory syndrome-related coronavirus
  REGION 1..11: note = Table B: HLA-DQA1*01:02-B1*06:02L HLA-DPA1*03:01-B1*04:02L HLA-DPA1*01:03-B1*04:02L HLA-DQA1*01:03-B1*06:01L HLA-DQA1*02:01-B1*03:03L
  source 1..11: note = Severe acute respiratory syndrome coronavirus 2
LRSDVLLPLTQ

SEQ ID NO: 18029 - protein, 12 aa, Severe acute respiratory syndrome-related coronavirus
  REGION 1..12: note = Table B: HLA-DQA1*01:02-B1*06:02L HLA-DRB1*01:02L HLA-DRB1*08:04L HLA-DPA1*03:01-B1*04:02L HLA-DRB1*08:01L HLA-DQA1*01-B1*05L HLA-DPA1*01:03-B1*04:01L HLA-DRB1*12:01L HLA-DPA1*03:01-B1*105:01L HLA-DRB1*16:01L HLA-DRB1*04:08L
  REGION 1..12: note = CONT. FROM ABOVE: HLA-DRB1*15:03L
  source 1..12: note = Severe acute respiratory syndrome coronavirus 2
LPLTQYNRYLAL

SEQ ID NO: 18030 - protein, 14 aa, Severe acute respiratory syndrome-related coronavirus
  REGION 1..14: note = Table B: HLA-DQA1*01:02-B1*06:02L
  source 1..14: note = Severe acute respiratory syndrome coronavirus 2
ALYNKYKYFSGAMD

SEQ ID NO: 18031 - protein, 14 aa, Severe acute respiratory syndrome-related coronavirus
  REGION 1..14: note = Table B: HLA-DQA1*01:02-B1*06:02L HLA-DPA1*01:03-B1*03:01L HLA-DRB1*12:01L HLA-DPA1*02:01-B1*13:01L HLA-DPA1*03:01-B1*105:01L
  source 1..14: note = Severe acute respiratory syndrome coronavirus 2
DTTSYREAACCHLA

SEQ ID NO: 18032 - protein, 12 aa, Severe acute respiratory syndrome-related coronavirus
  REGION 1..12: note = Table B: HLA-DQA1*01:02-B1*06:02L
  source 1..12: note = Severe acute respiratory syndrome coronavirus 2
YREAACCHLAKA

SEQ ID NO: 18033 - protein, 10 aa, Severe acute respiratory syndrome-related coronavirus
  REGION 1..10: note = Table B: HLA-DQA1*01:02-B1*06:02L
  source 1..10: note = Severe acute respiratory syndrome coronavirus 2
AACCHLAKAL

SEQ ID NO: 18034 - protein, 14 aa, Severe acute respiratory syndrome-related coronavirus
  REGION 1..14: note = Table B: HLA-DQA1*01:02-B1*06:02L HLA-DRB1*01:02L
  source 1..14: note = Severe acute respiratory syndrome coronavirus 2
KALNDFSNSGSDVL

SEQ ID NO: 18035 - protein, 12 aa, Severe acute respiratory syndrome-related coronavirus
  REGION 1..12: note = Table B: HLA-DQA1*01:02-B1*06:02L HLA-DQA1*03:01-B1*03:02L HLA-DQA1*01:03-B1*06:01L HLA-DQA1*02:01-B1*03:03L
  source 1..12: note = Severe acute respiratory syndrome coronavirus 2
NSGSDVLYQPPQ

SEQ ID NO: 18036 - protein, 14 aa, Severe acute respiratory syndrome-related coronavirus
  REGION 1..14: note = Table B: HLA-DQA1*01:02-B1*06:02L
  source 1..14: note = Severe acute respiratory syndrome coronavirus 2
YQPPQTSITSAVLQ

SEQ ID NO: 18037 - protein, 14 aa, Severe acute respiratory syndrome-related coronavirus
  REGION 1..14: note = Table B: HLA-DQA1*01:02-B1*06:02L
  source 1..14: note = Severe acute respiratory syndrome coronavirus 2
VLQSGFRKMAFPSG

SEQ ID NO: 18038 - protein, 14 aa, Severe acute respiratory syndrome-related coronavirus
  REGION 1..14: note = Table B: HLA-DQA1*01:02-B1*06:02L
  source 1..14: note = Severe acute respiratory syndrome coronavirus 2
LQSGFRKMAFPSGK

SEQ ID NO: 18039 - protein, 12 aa, Severe acute respiratory syndrome-related coronavirus
  REGION 1..12: note = Table B: HLA-DQA1*01:02-B1*06:02L
  source 1..12: note = Severe acute respiratory syndrome coronavirus 2
MAFPSGKVEGCM

SEQ ID NO: 18040 - protein, 11 aa, Severe acute respiratory syndrome-related coronavirus
  REGION 1..11: note = Table B: HLA-DQA1*01:02-B1*06:02L
  source 1..11: note = Severe acute respiratory syndrome coronavirus 2
GKVEGCMVQVT

SEQ ID NO: 18041 - protein, 12 aa, Severe acute respiratory syndrome-related coronavirus
  REGION 1..12: note = Table B: HLA-DQA1*01:02-B1*06:02L
  source 1..12: note = Severe acute respiratory syndrome coronavirus 2
KVEGCMVQVTCG

SEQ ID NO: 18042 - protein, 12 aa, Severe acute respiratory syndrome-related coronavirus
  REGION 1..12: note = Table B: HLA-DQA1*01:02-B1*06:02L
  source 1..12: note = Severe acute respiratory syndrome coronavirus 2
VEGCMVQVTCGT

SEQ ID NO: 18043 - protein, 14 aa, Severe acute respiratory syndrome-related coronavirus
  REGION 1..14: note = Table B: HLA-DQA1*01:02-B1*06:02L
  source 1..14: note = Severe acute respiratory syndrome coronavirus 2
VQVTCGTTTLNGLW

SEQ ID NO: 18044 - protein, 12 aa, Severe acute respiratory syndrome-related coronavirus
  REGION 1..12: note = Table B: HLA-DQA1*01:02-B1*06:02L HLA-DRB1*12:01L HLA-DRB1*14:54L HLA-DPA1*01:02-B1*04:01L HLA-DRB1*16:01L HLA-DRB1*15:03L
  source 1..12: note = Severe acute respiratory syndrome coronavirus 2
LDDVVYCPRHVI

SEQ ID NO: 18045 - protein, 15 aa, Severe acute respiratory syndrome-related coronavirus
  REGION 1..15: note = Table B: HLA-DQA1*01:02-B1*06:02L
  source 1..15: note = Severe acute respiratory syndrome coronavirus 2
DVVYCPRHVICTSED

SEQ ID NO: 18046 - protein, 11 aa, Severe acute respiratory syndrome-related coronavirus
  REGION 1..11: note = Table B: HLA-DQA1*01:02-B1*06:02L HLA-DPA1*03:01-B1*04:02L HLA-DRB1*12:01L HLA-DPA1*02:01-B1*13:01L HLA-DPA1*01:02-B1*04:01L HLA-DRB1*16:01L
  source 1..11: note = Severe acute respiratory syndrome coronavirus 2
DMLNPNYEDLL

SEQ ID NO: 18047 - protein, 12 aa, Severe acute respiratory syndrome-related coronavirus
  REGION 1..12: note = Table B: HLA-DQA1*01:02-B1*06:02L HLA-DQA1*01:03-B1*06:01L
  source 1..12: note = Severe acute respiratory syndrome coronavirus 2
PNYEDLLIRKSN

SEQ ID NO: 18048 - protein, 10 aa, Severe acute respiratory syndrome-related coronavirus
  REGION 1..10: note = Table B: HLA-DQA1*01:02-B1*06:02L HLA-DQA1*02:01-B1*03:03L
  source 1..10: note = Severe acute respiratory syndrome coronavirus 2
LLIRKSNHNF

SEQ ID NO: 18049 - protein, 12 aa, Severe acute respiratory syndrome-related coronavirus
  REGION 1..12: note = Table B: HLA-DQA1*01:02-B1*06:02L HLA-DQA1*03:01-B1*03:02L HLA-DQA1*01:03-B1*06:01L HLA-DQA1*02:01-B1*03:03L
  source 1..12: note = Severe acute respiratory syndrome coronavirus 2
KSNHNFLVQAGN

SEQ ID NO: 18050 - protein, 12 aa, Severe acute respiratory syndrome-related coronavirus
  REGION 1..12: note = Table B: HLA-DQA1*01:02-B1*06:02L HLA-DRB1*14:01L
  source 1..12: note = Severe acute respiratory syndrome coronavirus 2
GNVQLRVIGHSM

SEQ ID NO: 18051 - protein, 12 aa, Severe acute respiratory syndrome-related coronavirus
  REGION 1..12: note = Table B: HLA-DQA1*01:02-B1*06:02L HLA-DRB1*01:02L HLA-DPA1*03:01-B1*105:01L HLA-DQA1*01:03-B1*06:01L HLA-DQA1*02:01-B1*03:03L
  source 1..12: note = Severe acute respiratory syndrome coronavirus 2
VIGHSMQNCVLK

SEQ ID NO: 18052 - protein, 12 aa, Severe acute respiratory syndrome-related coronavirus
  REGION 1..12: note = Table B: HLA-DQA1*01:02-B1*06:02L
  source 1..12: note = Severe acute respiratory syndrome coronavirus 2
SMQNCVLKLKVD

SEQ ID NO: 18053 - protein, 12 aa, Severe acute respiratory syndrome-related coronavirus
  REGION 1..12: note = Table B: HLA-DQA1*01:02-B1*06:02L
  source 1..12: note = Severe acute respiratory syndrome coronavirus 2
MQNCVLKLKVDT

SEQ ID NO: 18054 - protein, 12 aa, Severe acute respiratory syndrome-related coronavirus
  REGION 1..12: note = Table B: HLA-DQA1*01:02-B1*06:02L HLA-DPA1*01:03-B1*03:01L HLA-DRB1*03:01L HLA-DRB3*01:01L HLA-DRB1*15:03L
  source 1..12: note = Severe acute respiratory syndrome coronavirus 2
LKVDTANPKTPK

SEQ ID NO: 18055 - protein, 10 aa, Severe acute respiratory syndrome-related coronavirus
  REGION 1..10: note = Table B: HLA-DQA1*01:02-B1*06:02L HLA-DQA1*02:01-B1*03:03L
  source 1..10: note = Severe acute respiratory syndrome coronavirus 2
ANPKTPKYKF

SEQ ID NO: 18056 - protein, 10 aa, Severe acute respiratory syndrome-related coronavirus
  REGION 1..10: note = Table B: HLA-DQA1*01:02-B1*06:02L HLA-DQA1*01:03-B1*06:01L
  source 1..10: note = Severe acute respiratory syndrome coronavirus 2
YKFVRIQPGQ

SEQ ID NO: 18057 - protein, 16 aa, Severe acute respiratory syndrome-related coronavirus
  REGION 1..16: note = Table B: HLA-DQA1*01:02-B1*06:02L HLA-DPA1*03:01-B1*105:01L HLA-DPA1*01:03-B1*104:01L HLA-DQA1*05:05-B1*03:01L
  source 1..16: note = Severe acute respiratory syndrome coronavirus 2
QPGQTFSVLACYNGSP

SEQ ID NO: 18058 - protein, 14 aa, Severe acute respiratory syndrome-related coronavirus
  REGION 1..14: note = Table B: HLA-DQA1*01:02-B1*06:02L HLA-DRB1*01:02L HLA-DPA1*03:01-B1*105:01L HLA-DQA1*05:05-B1*03:01L HLA-DRB1*10:01L HLA-DRB1*04:08L
  source 1..14: note = Severe acute respiratory syndrome coronavirus 2
QTFSVLACYNGSPS

SEQ ID NO: 18059 - protein, 14 aa, Severe acute respiratory syndrome-related coronavirus
  REGION 1..14: note = Table B: HLA-DQA1*01:02-B1*06:02L
  source 1..14: note = Severe acute respiratory syndrome coronavirus 2
TFSVLACYNGSPSG

SEQ ID NO: 18060 - protein, 11 aa, Severe acute respiratory syndrome-related coronavirus
  REGION 1..11: note = Table B: HLA-DQA1*01:02-B1*06:02L HLA-DQA1*05:05-B1*03:19L HLA-DQA1*05:01-B1*02:01L
  source 1..11: note = Severe acute respiratory syndrome coronavirus 2
ACYNGSPSGVY

SEQ ID NO: 18061 - protein, 14 aa, Severe acute respiratory syndrome-related coronavirus
  REGION 1..14: note = Table B: HLA-DQA1*01:02-B1*06:02L
  source 1..14: note = Severe acute respiratory syndrome coronavirus 2
NGSPSGVYQCAMRP

SEQ ID NO: 18062 - protein, 10 aa, Severe acute respiratory syndrome-related coronavirus
  REGION 1..10: note = Table B: HLA-DQA1*01:02-B1*06:02L
  source 1..10: note = Severe acute respiratory syndrome coronavirus 2
GVYQCAMRPN

SEQ ID NO: 18063 - protein, 10 aa, Severe acute respiratory syndrome-related coronavirus
  REGION 1..10: note = Table B: HLA-DQA1*01:02-B1*06:02L HLA-DQA1*01:03-B1*06:01L
  source 1..10: note = Severe acute respiratory syndrome coronavirus 2
VYQCAMRPNF

SEQ ID NO: 18064 - protein, 10 aa, Severe acute respiratory syndrome-related coronavirus
  REGION 1..10: note = Table B: HLA-DQA1*01:02-B1*06:02L HLA-DQA1*01:03-B1*06:01L
  source 1..10: note = Severe acute respiratory syndrome coronavirus 2
YQCAMRPNFT

SEQ ID NO: 18065 - protein, 12 aa, Severe acute respiratory syndrome-related coronavirus
  REGION 1..12: note = Table B: HLA-DQA1*01:02-B1*06:02L HLA-DQA1*01:03-B1*06:01L
  source 1..12: note = Severe acute respiratory syndrome coronavirus 2
FTIKGSFLNGSC

SEQ ID NO: 18066 - protein, 11 aa, Severe acute respiratory syndrome-related coronavirus
  REGION 1..11: note = Table B: HLA-DQA1*01:02-B1*06:02L HLA-DQA1*01:03-B1*06:01L
  source 1..11: note = Severe acute respiratory syndrome coronavirus 2
IKGSFLNGSCG

SEQ ID NO: 18067 - protein, 12 aa, Severe acute respiratory syndrome-related coronavirus
  REGION 1..12: note = Table B: HLA-DQA1*01:02-B1*06:02L HLA-DQA1*05:05-B1*03:01L
  source 1..12: note = Severe acute respiratory syndrome coronavirus 2
FLNGSCGSVGFN

SEQ ID NO: 18068 - protein, 13 aa, Severe acute respiratory syndrome-related coronavirus
  REGION 1..13: note = Table B: HLA-DQA1*01:02-B1*06:02L
  source 1..13: note = Severe acute respiratory syndrome coronavirus 2
LNGSCGSVGFNID

SEQ ID NO: 18069 - protein, 14 aa, Severe acute respiratory syndrome-related coronavirus
  REGION 1..14: note = Table B: HLA-DQA1*01:02-B1*06:02L
  source 1..14: note = Severe acute respiratory syndrome coronavirus 2
NGSCGSVGFNIDYD

SEQ ID NO: 18070 - protein, 10 aa, Severe acute respiratory syndrome-related coronavirus
  REGION 1..10: note = Table B: HLA-DQA1*01:02-B1*06:02L HLA-DQA1*05:05-B1*03:19L HLA-DPA1*02:01-B1*13:01L HLA-DPA1*03:01-B1*105:01L HLA-DQA1*01:03-B1*06:01L HLA-DRB1*15:03L
  source 1..10: note = Severe acute respiratory syndrome coronavirus 2
FNIDYDCVSF

SEQ ID NO: 18071 - protein, 12 aa, Severe acute respiratory syndrome-related coronavirus
  REGION 1..12: note = Table B: HLA-DQA1*01:02-B1*06:02L HLA-DPA1*01:03-B1*04:01L HLA-DPA1*01:03-B1*04:02L HLA-DRB1*16:01L HLA-DRB1*04:08L
  source 1..12: note = Severe acute respiratory syndrome coronavirus 2
IDYDCVSFCYMH

SEQ ID NO: 18072 - protein, 10 aa, Severe acute respiratory syndrome-related coronavirus
  REGION 1..10: note = Table B: HLA-DQA1*01:02-B1*06:02L HLA-DQA1*01:03-B1*06:01L
  source 1..10: note = Severe acute respiratory syndrome coronavirus 2
VSFCYMHHME

SEQ ID NO: 18073 - protein, 12 aa, Severe acute respiratory syndrome-related coronavirus
  REGION 1..12: note = Table B: HLA-DQA1*01:02-B1*06:02L HLA-DQA1*05:05-B1*03:19L
  source 1..12: note = Severe acute respiratory syndrome coronavirus 2
MELPTGVHAGTD

SEQ ID NO: 18074 - protein, 10 aa, Severe acute respiratory syndrome-related coronavirus
  REGION 1..10: note = Table B: HLA-DQA1*01:02-B1*06:02L HLA-DPA1*03:01-B1*105:01L HLA-DQA1*01:03-B1*06:01L HLA-DQA1*02:01-B1*03:03L
  source 1..10: note = Severe acute respiratory syndrome coronavirus 2
HAGTDLEGNF

SEQ ID NO: 18075 - protein, 13 aa, Severe acute respiratory syndrome-related coronavirus
  REGION 1..13: note = Table B: HLA-DQA1*01:02-B1*06:02L HLA-DPA1*03:01-B1*105:01L HLA-DQA1*03:01-B1*03:02L
  source 1..13: note = Severe acute respiratory syndrome coronavirus 2
TDLEGNFYGPFVD

SEQ ID NO: 18076 - protein, 12 aa, Severe acute respiratory syndrome-related coronavirus
  REGION 1..12: note = Table B: HLA-DQA1*01:02-B1*06:02L HLA-DQA1*01:03-B1*06:01L
  source 1..12: note = Severe acute respiratory syndrome coronavirus 2
LEGNFYGPFVDR

SEQ ID NO: 18077 - protein, 12 aa, Severe acute respiratory syndrome-related coronavirus
  REGION 1..12: note = Table B: HLA-DQA1*01:02-B1*06:02L HLA-DQA1*05:05-B1*03:19L HLA-DQA1*05:05-B1*03:01L HLA-DQA1*01:03-B1*06:01L
  source 1..12: note = Severe acute respiratory syndrome coronavirus 2
DRQTAQAAGTDT

SEQ ID NO: 18078 - protein, 14 aa, Severe acute respiratory syndrome-related coronavirus
  REGION 1..14: note = Table B: HLA-DQA1*01:02-B1*06:02L
  source 1..14: note = Severe acute respiratory syndrome coronavirus 2
AAGTDTTITVNVLA

SEQ ID NO: 18079 - protein, 10 aa, Severe acute respiratory syndrome-related coronavirus
  REGION 1..10: note = Table B: HLA-DQA1*01:02-B1*06:02L HLA-DPA1*01:03-B1*03:01L HLA-DQA1*05:05-B1*03:19L HLA-DQA1*05:01-B1*02:01L HLA-DRB4*01:01L HLA-DPA1*01:03-B1*04:01L HLA-DPA1*01:03-B1*104:01L
  source 1..10: note = Severe acute respiratory syndrome coronavirus 2
ITVNVLAWLY

SEQ ID NO: 18080 - protein, 13 aa, Severe acute respiratory syndrome-related coronavirus
  REGION 1..13: note = Table B: HLA-DQA1*01:02-B1*06:02L HLA-DRB1*01:02L HLA-DPA1*01:03-B1*03:01L HLA-DPA1*03:01-B1*04:02L HLA-DRB1*12:01L HLA-DPA1*03:01-B1*105:01L HLA-DRB1*16:01L
  source 1..13: note = Severe acute respiratory syndrome coronavirus 2
VNVLAWLYAAVIN

SEQ ID NO: 18081 - protein, 13 aa, Severe acute respiratory syndrome-related coronavirus
  REGION 1..13: note = Table B: HLA-DQA1*01:02-B1*06:02L
  source 1..13: note = Severe acute respiratory syndrome coronavirus 2
VINGDRWFLNRFT

SEQ ID NO: 18082 - protein, 11 aa, Severe acute respiratory syndrome-related coronavirus
  REGION 1..11: note = Table B: HLA-DQA1*01:02-B1*06:02L HLA-DQA1*05:01-B1*02:01L
  source 1..11: note = Severe acute respiratory syndrome coronavirus 2
DFNLVAMKYNY

SEQ ID NO: 18083 - protein, 12 aa, Severe acute respiratory syndrome-related coronavirus
  REGION 1..12: note = Table B: HLA-DQA1*01:02-B1*06:02L HLA-DPA1*03:01-B1*04:02L HLA-DRB1*12:01L HLA-DPA1*03:01-B1*105:01L HLA-DPA1*01:02-B1*04:01L HLA-DRB1*15:03L
  source 1..12: note = Severe acute respiratory syndrome coronavirus 2
FNLVAMKYNYEP

SEQ ID NO: 18084 - protein, 12 aa, Severe acute respiratory syndrome-related coronavirus
  REGION 1..12: note = Table B: HLA-DQA1*01:02-B1*06:02L HLA-DPA1*03:01-B1*105:01L
  source 1..12: note = Severe acute respiratory syndrome coronavirus 2
NLVAMKYNYEPL

SEQ ID NO: 18085 - protein, 13 aa, Severe acute respiratory syndrome-related coronavirus
  REGION 1..13: note = Table B: HLA-DQA1*01:02-B1*06:02L HLA-DPA1*03:01-B1*04:02L HLA-DQA1*05:01-B1*02:01L HLA-DPA1*02:01-B1*13:01L HLA-DPA1*03:01-B1*105:01L HLA-DPA1*01:02-B1*04:01L HLA-DRB1*16:01L HLA-DRB1*15:03L
  source 1..13: note = Severe acute respiratory syndrome coronavirus 2
VAMKYNYEPLTQD

SEQ ID NO: 18086 - protein, 12 aa, Severe acute respiratory syndrome-related coronavirus
  REGION 1..12: note = Table B: HLA-DQA1*01:02-B1*06:02L HLA-DRB1*01:02L HLA-DRB1*08:04L HLA-DPA1*03:01-B1*04:02L HLA-DRB1*12:01L HLA-DPA1*02:01-B1*13:01L HLA-DRB1*08:03L HLA-DRB1*15:03L
  source 1..12: note = Severe acute respiratory syndrome coronavirus 2
MKYNYEPLTQDH

SEQ ID NO: 18087 - protein, 12 aa, Severe acute respiratory syndrome-related coronavirus
  REGION 1..12: note = Table B: HLA-DQA1*01:02-B1*06:02L
  source 1..12: note = Severe acute respiratory syndrome coronavirus 2
LDMCASLKELLQ

SEQ ID NO: 18088 - protein, 12 aa, Severe acute respiratory syndrome-related coronavirus
  REGION 1..12: note = Table B: HLA-DQA1*01:02-B1*06:02L
  source 1..12: note = Severe acute respiratory syndrome coronavirus 2
DMCASLKELLQN

SEQ ID NO: 18089 - protein, 12 aa, Severe acute respiratory syndrome-related coronavirus
  REGION 1..12: note = Table B: HLA-DQA1*01:02-B1*06:02L HLA-DQA1*01:03-B1*06:01L
  source 1..12: note = Severe acute respiratory syndrome coronavirus 2
LQNGMNGRTILG

SEQ ID NO: 18090 - protein, 12 aa, Severe acute respiratory syndrome-related coronavirus
  REGION 1..12: note = Table B: HLA-DQA1*01:02-B1*06:02L HLA-DPA1*03:01-B1*105:01L HLA-DQA1*05:05-B1*03:01L HLA-DQA1*01:03-B1*06:01L
  source 1..12: note = Severe acute respiratory syndrome coronavirus 2
GMNGRTILGSAL

SEQ ID NO: 18091 - protein, 14 aa, Severe acute respiratory syndrome-related coronavirus
  REGION 1..14: note = Table B: HLA-DQA1*01:02-B1*06:02L
  source 1..14: note = Severe acute respiratory syndrome coronavirus 2
MNGRTILGSALLED

SEQ ID NO: 18092 - protein, 11 aa, Severe acute respiratory syndrome-related coronavirus
  REGION 1..11: note = Table B: HLA-DQA1*01:02-B1*06:02L HLA-DQA1*05:01-B1*02:01L HLA-DPA1*03:01-B1*105:01L
  source 1..11: note = Severe acute respiratory syndrome coronavirus 2
ILGSALLEDEF

SEQ ID NO: 18093 - protein, 12 aa, Severe acute respiratory syndrome-related coronavirus
  REGION 1..12: note = Table B: HLA-DQA1*01:02-B1*06:02L
  source 1..12: note = Severe acute respiratory syndrome coronavirus 2
PFDVVRQCSGVT

SEQ ID NO: 18094 - protein, 12 aa, Severe acute respiratory syndrome-related coronavirus
  REGION 1..12: note = Table B: HLA-DQA1*01:02-B1*06:02L HLA-DRB1*01:02L HLA-DRB1*12:01L HLA-DRB1*16:01L HLA-DRB1*15:03L
  source 1..12: note = Severe acute respiratory syndrome coronavirus 2
DVVRQCSGVTFQ

SEQ ID NO: 18095 - protein, 13 aa, Severe acute respiratory syndrome-related coronavirus
  REGION 1..13: note = Table B: HLA-DQA1*01:02-B1*06:02L HLA-DRB1*01:02L HLA-DQA1*01:03-B1*06:01L HLA-DRB1*15:03L
  source 1..13: note = Severe acute respiratory syndrome coronavirus 2
VVRQCSGVTFQSA

SEQ ID NO: 18096 - protein, 12 aa, Severe acute respiratory syndrome-related coronavirus
  REGION 1..12: note = Table B: HLA-DQA1*01:02-B1*06:02L
  source 1..12: note = Severe acute respiratory syndrome coronavirus 2
QCSGVTFQSAVK

SEQ ID NO: 18097 - protein, 14 aa, Severe acute respiratory syndrome-related coronavirus
  REGION 1..14: note = Table B: HLA-DQA1*01:02-B1*06:02L HLA-DRB1*11:04L HLA-DRB1*11:01L HLA-DRB3*01:01L
  source 1..14: note = Severe acute respiratory syndrome coronavirus 2
FQSAVKRTIKGTHH

SEQ ID NO: 18098 - protein, 15 aa, Severe acute respiratory syndrome-related coronavirus
  REGION 1..15: note = Table B: HLA-DQA1*01:02-B1*06:02L
  source 1..15: note = Severe acute respiratory syndrome coronavirus 2
IKGTHHWLLLTILTS

SEQ ID NO: 18099 - protein, 12 aa, Severe acute respiratory syndrome-related coronavirus
  REGION 1..12: note = Table B: HLA-DQA1*01:02-B1*06:02L HLA-DPA1*03:01-B1*105:01L
  source 1..12: note = Severe acute respiratory syndrome coronavirus 2
LTSLLVLVQSTQ

SEQ ID NO: 18100 - protein, 10 aa, Severe acute respiratory syndrome-related coronavirus
  REGION 1..10: note = Table B: HLA-DQA1*01:02-B1*06:02L HLA-DQA1*05:05-B1*03:19L HLA-DPA1*03:01-B1*105:01L HLA-DRB1*15:03L
  source 1..10: note = Severe acute respiratory syndrome coronavirus 2
LLVLVQSTQW

SEQ ID NO: 18101 - protein, 10 aa, Severe acute respiratory syndrome-related coronavirus
  REGION 1..10: note = Table B: HLA-DQA1*01:02-B1*06:02L HLA-DPA1*03:01-B1*105:01L HLA-DQA1*01:03-B1*06:01L HLA-DQA1*02:01-B1*03:03L HLA-DRB1*15:03L
  source 1..10: note = Severe acute respiratory syndrome coronavirus 2
LVQSTQWSLF

SEQ ID NO: 18102 - protein, 10 aa, Severe acute respiratory syndrome-related coronavirus
  REGION 1..10: note = Table B: HLA-DQA1*01:02-B1*06:02L HLA-DQA1*05:05-B1*03:19L HLA-DPA1*02:01-B1*13:01L HLA-DPA1*03:01-B1*105:01L HLA-DQA1*01:03-B1*06:01L HLA-DRB1*15:03L
  source 1..10: note = Severe acute respiratory syndrome coronavirus 2
VQSTQWSLFF

SEQ ID NO: 18103 - protein, 11 aa, Severe acute respiratory syndrome-related coronavirus
  REGION 1..11: note = Table B: HLA-DQA1*01:02-B1*06:02L HLA-DQA1*05:01-B1*02:01L HLA-DPA1*03:01-B1*105:01L
  source 1..11: note = Severe acute respiratory syndrome coronavirus 2
YENAFLPFAMG

SEQ ID NO: 18104 - protein, 10 aa, Severe acute respiratory syndrome-related coronavirus
  REGION 1..10: note = Table B: HLA-DQA1*01:02-B1*06:02L HLA-DQA1*05:05-B1*03:19L HLA-DPA1*03:01-B1*105:01L HLA-DQA1*01:03-B1*06:01L HLA-DRB1*15:03L
  source 1..10: note = Severe acute respiratory syndrome coronavirus 2
AMGIIAMSAF

SEQ ID NO: 18105 - protein, 12 aa, Severe acute respiratory syndrome-related coronavirus
  REGION 1..12: note = Table B: HLA-DQA1*01:02-B1*06:02L HLA-DPA1*03:01-B1*105:01L HLA-DQA1*01:03-B1*06:01L
  source 1..12: note = Severe acute respiratory syndrome coronavirus 2
IAMSAFAMMFVK

SEQ ID NO: 18106 - protein, 12 aa, Severe acute respiratory syndrome-related coronavirus
  REGION 1..12: note = Table B: HLA-DQA1*01:02-B1*06:02L HLA-DRB1*01:02L
  source 1..12: note = Severe acute respiratory syndrome coronavirus 2
MSAFAMMFVKHK

SEQ ID NO: 18107 - protein, 10 aa, Severe acute respiratory syndrome-related coronavirus
  REGION 1..10: note = Table B: HLA-DQA1*01:02-B1*06:02L HLA-DQA1*01:03-B1*06:01L HLA-DQA1*02:01-B1*03:03L
  source 1..10: note = Severe acute respiratory syndrome coronavirus 2
MMFVKHKHAF

SEQ ID NO: 18108 - protein, 15 aa, Severe acute respiratory syndrome-related coronavirus
  REGION 1..15: note = Table B: HLA-DQA1*01:02-B1*06:02L HLA-DPA1*01:03-B1*03:01L HLA-DPA1*03:01-B1*04:02L HLA-DRB1*12:01L HLA-DPA1*02:01-B1*13:01L HLA-DPA1*03:01-B1*105:01L HLA-DPA1*01:03-B1*104:01L HLA-DRB1*15:03L
  source 1..15: note = Severe acute respiratory syndrome coronavirus 2
VKHKHAFLCLFLLPS

SEQ ID NO: 18109 - protein, 14 aa, Severe acute respiratory syndrome-related coronavirus
  REGION 1..14: note = Table B: HLA-DQA1*01:02-B1*06:02L HLA-DPA1*01:03-B1*04:02L HLA-DRB1*04:08L
  source 1..14: note = Severe acute respiratory syndrome coronavirus 2
KHAFLCLFLLPSLA

SEQ ID NO: 18110 - protein, 14 aa, Severe acute respiratory syndrome-related coronavirus
  REGION 1..14: note = Table B: HLA-DQA1*01:02-B1*06:02L HLA-DPA1*01:03-B1*04:02L
  source 1..14: note = Severe acute respiratory syndrome coronavirus 2
HAFLCLFLLPSLAT

SEQ ID NO: 18111 - protein, 10 aa, Severe acute respiratory syndrome-related coronavirus
  REGION 1..10: note = Table B: HLA-DQA1*01:02-B1*06:02L HLA-DPA1*03:01-B1*105:01L
  source 1..10: note = Severe acute respiratory syndrome coronavirus 2
LPSLATVAYF

SEQ ID NO: 18112 - protein, 13 aa, Severe acute respiratory syndrome-related coronavirus
  REGION 1..13: note = Table B: HLA-DQA1*01:02-B1*06:02L
  source 1..13: note = Severe acute respiratory syndrome coronavirus 2
TVAYFNMVYMPAS

SEQ ID NO: 18113 - protein, 10 aa, Severe acute respiratory syndrome-related coronavirus
  REGION 1..10: note = Table B: HLA-DQA1*01:02-B1*06:02L HLA-DQA1*05:05-B1*03:19L
  source 1..10: note = Severe acute respiratory syndrome coronavirus 2
FNMVYMPASW

SEQ ID NO: 18114 - protein, 10 aa, Severe acute respiratory syndrome-related coronavirus
  REGION 1..10: note = Table B: HLA-DQA1*01:02-B1*06:02L
  source 1..10: note = Severe acute respiratory syndrome coronavirus 2
ASWVMRIMTW

SEQ ID NO: 18115 - protein, 12 aa, Severe acute respiratory syndrome-related coronavirus
  REGION 1..12: note = Table B: HLA-DQA1*01:02-B1*06:02L
  source 1..12: note = Severe acute respiratory syndrome coronavirus 2
VDTSLSGFKLKD

SEQ ID NO: 18116 - protein, 13 aa, Severe acute respiratory syndrome-related coronavirus
  REGION 1..13: note = Table B: HLA-DQA1*01:02-B1*06:02L
  source 1..13: note = Severe acute respiratory syndrome coronavirus 2
TSLSGFKLKDCVM

SEQ ID NO: 18117 - protein, 11 aa, Severe acute respiratory syndrome-related coronavirus
  REGION 1..11: note = Table B: HLA-DQA1*01:02-B1*06:02L
  source 1..11: note = Severe acute respiratory syndrome coronavirus 2
KLKDCVMYASA

SEQ ID NO: 18118 - protein, 12 aa, Severe acute respiratory syndrome-related coronavirus
  REGION 1..12: note = Table B: HLA-DQA1*01:02-B1*06:02L
  source 1..12: note = Severe acute respiratory syndrome coronavirus 2
LKDCVMYASAVV

SEQ ID NO: 18119 - protein, 14 aa, Severe acute respiratory syndrome-related coronavirus
  REGION 1..14: note = Table B: HLA-DQA1*01:02-B1*06:02L HLA-DPA1*03:01-B1*105:01L
  source 1..14: note = Severe acute respiratory syndrome coronavirus 2
ASAVVLLILMTART

SEQ ID NO: 18120 - protein, 10 aa, Severe acute respiratory syndrome-related coronavirus
  REGION 1..10: note = Table B: HLA-DQA1*01:02-B1*06:02L HLA-DQA1*05:05-B1*03:19L HLA-DQA1*05:01-B1*02:01L HLA-DRB1*12:01L HLA-DRB1*15:03L
  source 1..10: note = Severe acute respiratory syndrome coronavirus 2
LILMTARTVY

SEQ ID NO: 18121 - protein, 14 aa, Severe acute respiratory syndrome-related coronavirus
  REGION 1..14: note = Table B: HLA-DQA1*01:02-B1*06:02L
  source 1..14: note = Severe acute respiratory syndrome coronavirus 2
DGARRVWTLMNVLT

SEQ ID NO: 18122 - protein, 11 aa, Severe acute respiratory syndrome-related coronavirus
  REGION 1..11: note = Table B: HLA-DQA1*01:02-B1*06:02L HLA-DPA1*03:01-B1*04:02L HLA-DRB1*12:01L HLA-DPA1*03:01-B1*105:01L HLA-DRB1*15:03L
  source 1..11: note = Severe acute respiratory syndrome coronavirus 2
RVWTLMNVLTL

SEQ ID NO: 18123 - protein, 10 aa, Severe acute respiratory syndrome-related coronavirus
  REGION 1..10: note = Table B: HLA-DQA1*01:02-B1*06:02L HLA-DQA1*05:05-B1*03:19L HLA-DQA1*05:01-B1*02:01L
  source 1..10: note = Severe acute respiratory syndrome coronavirus 2
VLTLVYKVYY

SEQ ID NO: 18124 - protein, 14 aa, Severe acute respiratory syndrome-related coronavirus
  REGION 1..14: note = Table B: HLA-DQA1*01:02-B1*06:02L HLA-DPA1*03:01-B1*105:01L
  source 1..14: note = Severe acute respiratory syndrome coronavirus 2
DQAISMWALIISVT

SEQ ID NO: 18125 - protein, 10 aa, Severe acute respiratory syndrome-related coronavirus
  REGION 1..10: note = Table B: HLA-DQA1*01:02-B1*06:02L HLA-DQA1*05:05-B1*03:19L HLA-DPA1*02:01-B1*13:01L HLA-DPA1*03:01-B1*105:01L HLA-DQA1*01:03-B1*06:01L HLA-DQA1*02:01-B1*03:03L HLA-DRB1*15:03L
  source 1..10: note = Severe acute respiratory syndrome coronavirus 2
YSGVVTTVMF

SEQ ID NO: 18126 - protein, 10 aa, Severe acute respiratory syndrome-related coronavirus
  REGION 1..10: note = Table B: HLA-DQA1*01:02-B1*06:02L HLA-DPA1*03:01-B1*105:01L HLA-DQA1*01:03-B1*06:01L HLA-DQA1*02:01-B1*03:03L
  source 1..10: note = Severe acute respiratory syndrome coronavirus 2
VTTVMFLARG

SEQ ID NO: 18127 - protein, 12 aa, Severe acute respiratory syndrome-related coronavirus
  REGION 1..12: note = Table B: HLA-DQA1*01:02-B1*06:02L
  source 1..12: note = Severe acute respiratory syndrome coronavirus 2
FLARGIVFMCVE

SEQ ID NO: 18128 - protein, 12 aa, Severe acute respiratory syndrome-related coronavirus
  REGION 1..12: note = Table B: HLA-DQA1*01:02-B1*06:02L
  source 1..12: note = Severe acute respiratory syndrome coronavirus 2
LARGIVFMCVEY

SEQ ID NO: 18129 - protein, 14 aa, Severe acute respiratory syndrome-related coronavirus
  REGION 1..14: note = Table B: HLA-DQA1*01:02-B1*06:02L HLA-DRB1*15:03L
  source 1..14: note = Severe acute respiratory syndrome coronavirus 2
ARGIVFMCVEYCPI

SEQ ID NO: 18130 - protein, 13 aa, Severe acute respiratory syndrome-related coronavirus
  REGION 1..13: note = Table B: HLA-DQA1*01:02-B1*06:02L HLA-DPA1*03:01-B1*105:01L
  source 1..13: note = Severe acute respiratory syndrome coronavirus 2
VEYCPIFFITGNT

SEQ ID NO: 18131 - protein, 11 aa, Severe acute respiratory syndrome-related coronavirus
  REGION 1..11: note = Table B: HLA-DQA1*01:02-B1*06:02L HLA-DPA1*03:01-B1*105:01L HLA-DQA1*01:03-B1*06:01L
  source 1..11: note = Severe acute respiratory syndrome coronavirus 2
FITGNTLQCIM

SEQ ID NO: 18132 - protein, 10 aa, Severe acute respiratory syndrome-related coronavirus
  REGION 1..10: note = Table B: HLA-DQA1*01:02-B1*06:02L HLA-DQA1*05:05-B1*03:19L
  source 1..10: note = Severe acute respiratory syndrome coronavirus 2
NTLQCIMLVY

SEQ ID NO: 18133 - protein, 10 aa, Severe acute respiratory syndrome-related coronavirus
  REGION 1..10: note = Table B: HLA-DQA1*01:02-B1*06:02L HLA-DQA1*05:05-B1*03:19L
  source 1..10: note = Severe acute respiratory syndrome coronavirus 2
FGLFCLLNRY

SEQ ID NO: 18134 - protein, 10 aa, Severe acute respiratory syndrome-related coronavirus
  REGION 1..10: note = Table B: HLA-DQA1*01:02-B1*06:02L HLA-DQA1*05:05-B1*03:19L HLA-DQA1*05:01-B1*02:01L
  source 1..10: note = Severe acute respiratory syndrome coronavirus 2
FRLTLGVYDY

SEQ ID NO: 18135 - protein, 14 aa, Severe acute respiratory syndrome-related coronavirus
  REGION 1..14: note = Table B: HLA-DQA1*01:02-B1*06:02L
  source 1..14: note = Severe acute respiratory syndrome coronavirus 2
RLTLGVYDYLVSTQ

SEQ ID NO: 18136 - protein, 12 aa, Severe acute respiratory syndrome-related coronavirus
  REGION 1..12: note = Table B: HLA-DQA1*01:02-B1*06:02L HLA-DPA1*03:01-B1*105:01L HLA-DQA1*02:01-B1*03:03L
  source 1..12: note = Severe acute respiratory syndrome coronavirus 2
VSTQEFRYMNSQ

SEQ ID NO: 18137 - protein, 12 aa, Severe acute respiratory syndrome-related coronavirus
  REGION 1..12: note = Table B: HLA-DQA1*01:02-B1*06:02L HLA-DQA1*05:05-B1*03:01L HLA-DQA1*01:03-B1*06:01L HLA-DQA1*02:01-B1*03:03L
  source 1..12: note = Severe acute respiratory syndrome coronavirus 2
SQGLLPPKNSID

SEQ ID NO: 18138 - protein, 12 aa, Severe acute respiratory syndrome-related coronavirus
  REGION 1..12: note = Table B: HLA-DQA1*01:02-B1*06:02L HLA-DRB1*11:04L HLA-DRB1*08:01L HLA-DRB1*11:01L
  source 1..12: note = Severe acute respiratory syndrome coronavirus 2
AFKLNIKLLGVG

SEQ ID NO: 18139 - protein, 12 aa, Severe acute respiratory syndrome-related coronavirus
  REGION 1..12: note = Table B: HLA-DQA1*01:02-B1*06:02L HLA-DRB1*11:04L HLA-DRB1*11:01L HLA-DRB1*04:08L
  source 1..12: note = Severe acute respiratory syndrome coronavirus 2
FKLNIKLLGVGG

SEQ ID NO: 18140 - protein, 12 aa, Severe acute respiratory syndrome-related coronavirus
  REGION 1..12: note = Table B: HLA-DQA1*01:02-B1*06:02L HLA-DRB1*01:02L HLA-DRB1*12:01L HLA-DRB1*16:01L HLA-DQA1*02:01-B1*03:03L HLA-DRB1*15:03L
  source 1..12: note = Severe acute respiratory syndrome coronavirus 2
LNIKLLGVGGKP

SEQ ID NO: 18141 - protein, 13 aa, Severe acute respiratory syndrome-related coronavirus
  REGION 1..13: note = Table B: HLA-DQA1*01:02-B1*06:02L HLA-DRB1*01:01L HLA-DRB1*12:01L HLA-DRB1*16:01L HLA-DRB1*04:08L HLA-DQA1*02:01-B1*03:03L HLA-DRB1*15:03L
  source 1..13: note = Severe acute respiratory syndrome coronavirus 2
IKLLGVGGKPCIK

SEQ ID NO: 18142 - protein, 14 aa, Severe acute respiratory syndrome-related coronavirus
  REGION 1..14: note = Table B: HLA-DQA1*01:02-B1*06:02L HLA-DRB1*01:02L
  source 1..14: note = Severe acute respiratory syndrome coronavirus 2
KPCIKVATVQSKMS

SEQ ID NO: 18143 - protein, 14 aa, Severe acute respiratory syndrome-related coronavirus
  REGION 1..14: note = Table B: HLA-DQA1*01:02-B1*06:02L HLA-DPA1*02:01-B1*13:01L
  source 1..14: note = Severe acute respiratory syndrome coronavirus 2
VQSKMSDVKCTSVV

SEQ ID NO: 18144 - protein, 14 aa, Severe acute respiratory syndrome-related coronavirus
  REGION 1..14: note = Table B: HLA-DQA1*01:02-B1*06:02L
  source 1..14: note = Severe acute respiratory syndrome coronavirus 2
DVKCTSVVLLSVLQ

SEQ ID NO: 18145 - protein, 14 aa, Severe acute respiratory syndrome-related coronavirus
  REGION 1..14: note = Table B: HLA-DQA1*01:02-B1*06:02L
  source 1..14: note = Severe acute respiratory syndrome coronavirus 2
VKCTSVVLLSVLQQ

SEQ ID NO: 18146 - protein, 12 aa, Severe acute respiratory syndrome-related coronavirus
  REGION 1..12: note = Table B: HLA-DQA1*01:02-B1*06:02L HLA-DRB1*01:02L HLA-DRB1*14:01L HLA-DPA1*03:01-B1*105:01L
  source 1..12: note = Severe acute respiratory syndrome coronavirus 2
VLLSVLQQLRVE

SEQ ID NO: 18147 - protein, 10 aa, Severe acute respiratory syndrome-related coronavirus
  REGION 1..10: note = Table B: HLA-DQA1*01:02-B1*06:02L HLA-DQA1*01:03-B1*06:01L HLA-DQA1*02:01-B1*03:03L HLA-DRB1*15:03L
  source 1..10: note = Severe acute respiratory syndrome coronavirus 2
LRVESSSKLW

SEQ ID NO: 18148 - protein, 12 aa, Severe acute respiratory syndrome-related coronavirus
  REGION 1..12: note = Table B: HLA-DQA1*01:02-B1*06:02L
  source 1..12: note = Severe acute respiratory syndrome coronavirus 2
RVESSSKLWAQC

SEQ ID NO: 18149 - protein, 12 aa, Severe acute respiratory syndrome-related coronavirus
  REGION 1..12: note = Table B: HLA-DQA1*01:02-B1*06:02L HLA-DPA1*03:01-B1*105:01L
  source 1..12: note = Severe acute respiratory syndrome coronavirus 2
ESSSKLWAQCVQ

SEQ ID NO: 18150 - protein, 12 aa, Severe acute respiratory syndrome-related coronavirus
  REGION 1..12: note = Table B: HLA-DQA1*01:02-B1*06:02L
  source 1..12: note = Severe acute respiratory syndrome coronavirus 2
KLWAQCVQLHND

SEQ ID NO: 18151 - protein, 12 aa, Severe acute respiratory syndrome-related coronavirus
  REGION 1..12: note = Table B: HLA-DQA1*01:02-B1*06:02M HLA-DPA1*03:01-B1*105:01L HLA-DQA1*05:05-B1*03:01L HLA-DQA1*01:03-B1*06:01L
  source 1..12: note = Severe acute respiratory syndrome coronavirus 2
WAQCVQLHNDIL

SEQ ID NO: 18152 - protein, 12 aa, Severe acute respiratory syndrome-related coronavirus
  REGION 1..12: note = Table B: HLA-DQA1*01:02-B1*06:02L HLA-DQA1*03:01-B1*03:02L HLA-DQA1*01:03-B1*06:01L HLA-DQA1*02:01-B1*03:03L
  source 1..12: note = Severe acute respiratory syndrome coronavirus 2
LHNDILLAKDTT

SEQ ID NO: 18153 - protein, 12 aa, Severe acute respiratory syndrome-related coronavirus
  REGION 1..12: note = Table B: HLA-DQA1*01:02-B1*06:02L HLA-DPA1*01:03-B1*03:01L HLA-DPA1*03:01-B1*04:02L HLA-DRB1*14:02L HLA-DPA1*02:01-B1*13:01L HLA-DPA1*03:01-B1*105:01L HLA-DRB1*15:03L
  source 1..12: note = Severe acute respiratory syndrome coronavirus 2
LAKDTTEAFEKM

SEQ ID NO: 18154 - protein, 14 aa, Severe acute respiratory syndrome-related coronavirus
  REGION 1..14: note = Table B: HLA-DQA1*01:02-B1*06:02L HLA-DRB1*01:02L HLA-DPA1*03:01-B1*105:01L
  source 1..14: note = Severe acute respiratory syndrome coronavirus 2
EKMVSLLSVLLSMQ

SEQ ID NO: 18155 - protein, 14 aa, Severe acute respiratory syndrome-related coronavirus
  REGION 1..14: note = Table B: HLA-DQA1*01:02-B1*06:02L HLA-DRB1*01:02L HLA-DPA1*03:01-B1*105:01L
  source 1..14: note = Severe acute respiratory syndrome coronavirus 2
KMVSLLSVLLSMQG

SEQ ID NO: 18156 - protein, 12 aa, Severe acute respiratory syndrome-related coronavirus
  REGION 1..12: note = Table B: HLA-DQA1*01:02-B1*06:02L HLA-DQA1*01:03-B1*06:01L
  source 1..12: note = Severe acute respiratory syndrome coronavirus 2
QGAVDINKLCEE

SEQ ID NO: 18157 - protein, 12 aa, Severe acute respiratory syndrome-related coronavirus
  REGION 1..12: note = Table B: HLA-DQA1*01:02-B1*06:02L HLA-DPA1*03:01-B1*105:01L HLA-DQA1*01:03-B1*06:01L
  source 1..12: note = Severe acute respiratory syndrome coronavirus 2
GAVDINKLCEEM

SEQ ID NO: 18158 - protein, 12 aa, Severe acute respiratory syndrome-related coronavirus
  REGION 1..12: note = Table B: HLA-DQA1*01:02-B1*06:02L HLA-DRB1*12:01L HLA-DQA1*01:03-B1*06:01L HLA-DRB1*15:03L
  source 1..12: note = Severe acute respiratory syndrome coronavirus 2
DINKLCEEMLDN

SEQ ID NO: 18159 - protein, 13 aa, Severe acute respiratory syndrome-related coronavirus
  REGION 1..13: note = Table B: HLA-DQA1*01:02-B1*06:02L HLA-DRB1*01:02L HLA-DRB1*04:08L
  source 1..13: note = Severe acute respiratory syndrome coronavirus 2
NKLCEEMLDNRAT

SEQ ID NO: 18160 - protein, 12 aa, Severe acute respiratory syndrome-related coronavirus
  REGION 1..12: note = Table B: HLA-DQA1*01:02-B1*06:02L HLA-DPA1*03:01-B1*105:01L HLA-DQA1*05:05-B1*03:01L HLA-DQA1*01:03-B1*06:01L HLA-DQA1*02:01-B1*03:03L
  source 1..12: note = Severe acute respiratory syndrome coronavirus 2
MLDNRATLQAIA

SEQ ID NO: 18161 - protein, 11 aa, Severe acute respiratory syndrome-related coronavirus
  REGION 1..11: note = Table B: HLA-DQA1*01:02-B1*06:02L
  source 1..11: note = Severe acute respiratory syndrome coronavirus 2
IASEFSSLPSY

SEQ ID NO: 18162 - protein, 12 aa, Severe acute respiratory syndrome-related coronavirus
  REGION 1..12: note = Table B: HLA-DQA1*01:02-B1*06:02L HLA-DQA1*05:05-B1*03:19L HLA-DRB1*12:01L HLA-DQA1*01:03-B1*06:01L
  source 1..12: note = Severe acute respiratory syndrome coronavirus 2
YEQAVANGDSEV

SEQ ID NO: 18163 - protein, 13 aa, Severe acute respiratory syndrome-related coronavirus
  REGION 1..13: note = Table B: HLA-DQA1*01:02-B1*06:02L HLA-DQA1*05:05-B1*03:01L HLA-DRB1*16:01L
  source 1..13: note = Severe acute respiratory syndrome coronavirus 2
EQAVANGDSEVVL

SEQ ID NO: 18164 - protein, 12 aa, Severe acute respiratory syndrome-related coronavirus
  REGION 1..12: note = Table B: HLA-DQA1*01:02-B1*06:02L
  source 1..12: note = Severe acute respiratory syndrome coronavirus 2
NGDSEVVLKKLK

SEQ ID NO: 18165 - protein, 12 aa, Severe acute respiratory syndrome-related coronavirus
  REGION 1..12: note = Table B: HLA-DQA1*01:02-B1*06:02L HLA-DRB1*08:01L
  source 1..12: note = Severe acute respiratory syndrome coronavirus 2
DSEVVLKKLKKS

SEQ ID NO: 18166 - protein, 12 aa, Severe acute respiratory syndrome-related coronavirus
  REGION 1..12: note = Table B: HLA-DQA1*01:02-B1*06:02L HLA-DRB1*14:01L HLA-DRB1*08:01L HLA-DRB1*16:01L
  source 1..12: note = Severe acute respiratory syndrome coronavirus 2
EVVLKKLKKSLN

SEQ ID NO: 18167 - protein, 14 aa, Severe acute respiratory syndrome-related coronavirus
  REGION 1..14: note = Table B: HLA-DQA1*01:02-B1*06:02L HLA-DRB1*08:01L HLA-DRB3*01:01L
  source 1..14: note = Severe acute respiratory syndrome coronavirus 2
LKKLKKSLNVAKSE

SEQ ID NO: 18168 - protein, 12 aa, Severe acute respiratory syndrome-related coronavirus
  REGION 1..12: note = Table B: HLA-DQA1*01:02-B1*06:02L HLA-DRB1*12:01L HLA-DPA1*03:01-B1*105:01L HLA-DQA1*01:03-B1*06:01L HLA-DRB1*04:08L HLA-DQA1*02:01-B1*03:03L HLA-DRB1*15:03L
  source 1..12: note = Severe acute respiratory syndrome coronavirus 2
FDRDAAMQRKLE

SEQ ID NO: 18169 - protein, 12 aa, Severe acute respiratory syndrome-related coronavirus
  REGION 1..12: note = Table B: HLA-DQA1*01:02-B1*06:02L
  source 1..12: note = Severe acute respiratory syndrome coronavirus 2
DRDAAMQRKLEK

SEQ ID NO: 18170 - protein, 14 aa, Severe acute respiratory syndrome-related coronavirus
  REGION 1..14: note = Table B: HLA-DQA1*01:02-B1*06:02L HLA-DRB1*01:02L HLA-DRB1*14:01L
  source 1..14: note = Severe acute respiratory syndrome coronavirus 2
DAAMQRKLEKMADQ

SEQ ID NO: 18171 - protein, 14 aa, Severe acute respiratory syndrome-related coronavirus
  REGION 1..14: note = Table B: HLA-DQA1*01:02-B1*06:02L
  source 1..14: note = Severe acute respiratory syndrome coronavirus 2
AAMQRKLEKMADQA

SEQ ID NO: 18172 - protein, 12 aa, Severe acute respiratory syndrome-related coronavirus
  REGION 1..12: note = Table B: HLA-DQA1*01:02-B1*06:02L HLA-DQA1*02:01-B1*03:03L
  source 1..12: note = Severe acute respiratory syndrome coronavirus 2
ADQAMTQMYKQA

SEQ ID NO: 18173 - protein, 12 aa, Severe acute respiratory syndrome-related coronavirus
  REGION 1..12: note = Table B: HLA-DQA1*01:02-B1*06:02L HLA-DRB1*14:01L
  source 1..12: note = Severe acute respiratory syndrome coronavirus 2
QAMTQMYKQARS

SEQ ID NO: 18174 - protein, 14 aa, Severe acute respiratory syndrome-related coronavirus
  REGION 1..14: note = Table B: HLA-DQA1*01:02-B1*06:02L HLA-DRB1*08:01L
  source 1..14: note = Severe acute respiratory syndrome coronavirus 2
YKQARSEDKRAKVT

SEQ ID NO: 18175 - protein, 12 aa, Severe acute respiratory syndrome-related coronavirus
  REGION 1..12: note = Table B: HLA-DQA1*01:02-B1*06:02L
  source 1..12: note = Severe acute respiratory syndrome coronavirus 2
DKRAKVTSAMQT

SEQ ID NO: 18176 - protein, 10 aa, Severe acute respiratory syndrome-related coronavirus
  REGION 1..10: note = Table B: HLA-DQA1*01:02-B1*06:02L HLA-DPA1*03:01-B1*105:01L HLA-DQA1*01:03-B1*06:01L HLA-DQA1*02:01-B1*03:03L
  source 1..10: note = Severe acute respiratory syndrome coronavirus 2
VTSAMQTMLF

SEQ ID NO: 18177 - protein, 12 aa, Severe acute respiratory syndrome-related coronavirus
  REGION 1..12: note = Table B: HLA-DQA1*01:02-B1*06:02L
  source 1..12: note = Severe acute respiratory syndrome coronavirus 2
AMQTMLFTMLRK

SEQ ID NO: 18178 - protein, 13 aa, Severe acute respiratory syndrome-related coronavirus
  REGION 1..13: note = Table B: HLA-DQA1*01:02-B1*06:02L
  source 1..13: note = Severe acute respiratory syndrome coronavirus 2
MQTMLFTMLRKLD

SEQ ID NO: 18179 - protein, 10 aa, Severe acute respiratory syndrome-related coronavirus
  REGION 1..10: note = Table B: HLA-DQA1*01:02-B1*06:02L HLA-DRB1*08:01L HLA-DPA1*01:02-B1*04:01L HLA-DRB1*04:08L
  source 1..10: note = Severe acute respiratory syndrome coronavirus 2
LFTMLRKLDN

SEQ ID NO: 18180 - protein, 13 aa, Severe acute respiratory syndrome-related coronavirus
  REGION 1..13: note = Table B: HLA-DQA1*01:02-B1*06:02L HLA-DPA1*03:01-B1*105:01L
  source 1..13: note = Severe acute respiratory syndrome coronavirus 2
FTMLRKLDNDALN

SEQ ID NO: 18181 - protein, 13 aa, Severe acute respiratory syndrome-related coronavirus
  REGION 1..13: note = Table B: HLA-DQA1*01:02-B1*06:02L HLA-DQA1*01:03-B1*06:01L
  source 1..13: note = Severe acute respiratory syndrome coronavirus 2
IINNARDGCVPLN

SEQ ID NO: 18182 - protein, 15 aa, Severe acute respiratory syndrome-related coronavirus
  REGION 1..15: note = Table B: HLA-DQA1*01:02-B1*06:02L
  source 1..15: note = Severe acute respiratory syndrome coronavirus 2
INNARDGCVPLNIIP

SEQ ID NO: 18183 - protein, 13 aa, Severe acute respiratory syndrome-related coronavirus
  REGION 1..13: note = Table B: HLA-DQA1*01:02-B1*06:02L
  source 1..13: note = Severe acute respiratory syndrome coronavirus 2
ARDGCVPLNIIPL

SEQ ID NO: 18184 - protein, 14 aa, Severe acute respiratory syndrome-related coronavirus
  REGION 1..14: note = Table B: HLA-DQA1*01:02-B1*06:02L
  source 1..14: note = Severe acute respiratory syndrome coronavirus 2
RDGCVPLNIIPLTT

SEQ ID NO: 18185 - protein, 14 aa, Severe acute respiratory syndrome-related coronavirus
  REGION 1..14: note = Table B: HLA-DQA1*01:02-B1*06:02L
  source 1..14: note = Severe acute respiratory syndrome coronavirus 2
DGCVPLNIIPLTTA

SEQ ID NO: 18186 - protein, 12 aa, Severe acute respiratory syndrome-related coronavirus
  REGION 1..12: note = Table B: HLA-DQA1*01:02-B1*06:02L
  source 1..12: note = Severe acute respiratory syndrome coronavirus 2
PLNIIPLTTAAK

SEQ ID NO: 18187 - protein, 14 aa, Severe acute respiratory syndrome-related coronavirus
  REGION 1..14: note = Table B: HLA-DQA1*01:02-B1*06:02L HLA-DRB1*14:01L HLA-DQA1*05:05-B1*03:19L HLA-DPA1*03:01-B1*105:01L HLA-DQA1*05:05-B1*03:01L
  source 1..14: note = Severe acute respiratory syndrome coronavirus 2
IPLTTAAKLMVVIP

SEQ ID NO: 18188 - protein, 12 aa, Severe acute respiratory syndrome-related coronavirus
  REGION 1..12: note = Table B: HLA-DQA1*01:02-B1*06:02L HLA-DPA1*03:01-B1*105:01L HLA-DQA1*05:05-B1*03:01L HLA-DQA1*02:01-B1*03:03L
  source 1..12: note = Severe acute respiratory syndrome coronavirus 2
TAAKLMVVIPDY

SEQ ID NO: 18189 - protein, 13 aa, Severe acute respiratory syndrome-related coronavirus
  REGION 1..13: note = Table B: HLA-DQA1*01:02-B1*06:02L HLA-DRB1*08:04L HLA-DRB1*15:03L
  source 1..13: note = Severe acute respiratory syndrome coronavirus 2
YNTYKNTCDGTTF

SEQ ID NO: 18190 - protein, 10 aa, Severe acute respiratory syndrome-related coronavirus
  REGION 1..10: note = Table B: HLA-DQA1*01:02-B1*06:02L HLA-DRB1*08:77L HLA-DPA1*01:03-B1*03:01L HLA-DRB1*03:01L HLA-DRB1*14:02L HLA-DQA1*05:05-B1*03:19L HLA-DQA1*05:01-B1*02:01L HLA-DRB4*01:01L HLA-DPA1*01:03-B1*04:01L
  REGION 1..10: note = CONT. FROM ABOVE: HLA-DPA1*02:01-B1*13:01L HLA-DPA1*03:01-B1*105 :01L HLA-DPA1*01:03-B1*104:01L HLA-DQA1*02:01-B1*03:03L HLA-DRB1 *15:03L
  source 1..10: note = Severe acute respiratory syndrome coronavirus 2
NTCDGTTFTY

SEQ ID NO: 18191 - protein, 10 aa, Severe acute respiratory syndrome-related coronavirus
  REGION 1..10: note = Table B: HLA-DQA1*01:02-B1*06:02L
  source 1..10: note = Severe acute respiratory syndrome coronavirus 2
TTFTYASALW

SEQ ID NO: 18192 - protein, 11 aa, Severe acute respiratory syndrome-related coronavirus
  REGION 1..11: note = Table B: HLA-DQA1*01:02-B1*06:02L HLA-DPA1*03:01-B1*105:01L HLA-DQA1*01:03-B1*06:01L
  source 1..11: note = Severe acute respiratory syndrome coronavirus 2
FTYASALWEIQ

SEQ ID NO: 18193 - protein, 10 aa, Severe acute respiratory syndrome-related coronavirus
  REGION 1..10: note = Table B: HLA-DQA1*01:02-B1*06:02L HLA-DPA1*03:01-B1*04:02L HLA-DPA1*01:03-B1*04:02L HLA-DPA1*03:01-B1*105:01L HLA-DPA1*01:02-B1*04:01L HLA-DQA1*01:03-B1*06:01L
  source 1..10: note = Severe acute respiratory syndrome coronavirus 2
YASALWEIQQ

SEQ ID NO: 18194 - protein, 12 aa, Severe acute respiratory syndrome-related coronavirus
  REGION 1..12: note = Table B: HLA-DQA1*01:02-B1*06:02L HLA-DQA1*05:01-B1*02:01L HLA-DPA1*03:01-B1*105:01L HLA-DQA1*01:03-B1*06:01L HLA-DQA1*02:01-B1*03:03L
  source 1..12: note = Severe acute respiratory syndrome coronavirus 2
ASALWEIQQVVD

SEQ ID NO: 18195 - protein, 12 aa, Severe acute respiratory syndrome-related coronavirus
  REGION 1..12: note = Table B: HLA-DQA1*01:02-B1*06:02L HLA-DPA1*03:01-B1*105:01L
  source 1..12: note = Severe acute respiratory syndrome coronavirus 2
ALWEIQQVVDAD

SEQ ID NO: 18196 - protein, 12 aa, Severe acute respiratory syndrome-related coronavirus
  REGION 1..12: note = Table B: HLA-DQA1*01:02-B1*06:02L HLA-DPA1*03:01-B1*105:01L HLA-DQA1*05:05-B1*03:01L
  source 1..12: note = Severe acute respiratory syndrome coronavirus 2
SKIVQLSEISMD

SEQ ID NO: 18197 - protein, 14 aa, Severe acute respiratory syndrome-related coronavirus
  REGION 1..14: note = Table B: HLA-DQA1*01:02-B1*06:02L HLA-DQA1*05:05-B1*03:01L
  source 1..14: note = Severe acute respiratory syndrome coronavirus 2
SEISMDNSPNLAWP

SEQ ID NO: 18198 - protein, 15 aa, Severe acute respiratory syndrome-related coronavirus
  REGION 1..15: note = Table B: HLA-DQA1*01:02-B1*06:02L HLA-DQA1*05:05-B1*03:01L HLA-DQA1*01:03-B1*06:01L
  source 1..15: note = Severe acute respiratory syndrome coronavirus 2
ISMDNSPNLAWPLIV

SEQ ID NO: 18199 - protein, 10 aa, Severe acute respiratory syndrome-related coronavirus
  REGION 1..10: note = Table B: HLA-DQA1*01:02-B1*06:02L HLA-DPA1*03:01-B1*105:01L HLA-DQA1*03:01-B1*03:02L HLA-DPA1*01:02-B1*04:01L HLA-DQA1*01:03-B1*06:01L HLA-DQA1*02:01-B1*03:03L
  source 1..10: note = Severe acute respiratory syndrome coronavirus 2
LSPVALRQMS

SEQ ID NO: 18200 - protein, 14 aa, Severe acute respiratory syndrome-related coronavirus
  REGION 1..14: note = Table B: HLA-DQA1*01:02-B1*06:02L HLA-DRB1*01:02L
  source 1..14: note = Severe acute respiratory syndrome coronavirus 2
SPVALRQMSCAAGT

SEQ ID NO: 18201 - protein, 12 aa, Severe acute respiratory syndrome-related coronavirus
  REGION 1..12: note = Table B: HLA-DQA1*01:02-B1*06:02L
  source 1..12: note = Severe acute respiratory syndrome coronavirus 2
ALRQMSCAAGTT

SEQ ID NO: 18202 - protein, 13 aa, Severe acute respiratory syndrome-related coronavirus
  REGION 1..13: note = Table B: HLA-DQA1*01:02-B1*06:02L HLA-DQA1*05:05-B1*03:01L
  source 1..13: note = Severe acute respiratory syndrome coronavirus 2
RQMSCAAGTTQTA

SEQ ID NO: 18203 - protein, 16 aa, Severe acute respiratory syndrome-related coronavirus
  REGION 1..16: note = Table B: HLA-DQA1*01:02-B1*06:02L HLA-DQA1*05:05-B1*03:01L
  source 1..16: note = Severe acute respiratory syndrome coronavirus 2
QMSCAAGTTQTACTDD

SEQ ID NO: 18204 - protein, 14 aa, Severe acute respiratory syndrome-related coronavirus
  REGION 1..14: note = Table B: HLA-DQA1*01:02-B1*06:02L
  source 1..14: note = Severe acute respiratory syndrome coronavirus 2
AGTTQTACTDDNAL

SEQ ID NO: 18205 - protein, 14 aa, Severe acute respiratory syndrome-related coronavirus
  REGION 1..14: note = Table B: HLA-DQA1*01:02-B1*06:02L
  source 1..14: note = Severe acute respiratory syndrome coronavirus 2
NTTKGGRFVLALLS

SEQ ID NO: 18206 - protein, 14 aa, Severe acute respiratory syndrome-related coronavirus
  REGION 1..14: note = Table B: HLA-DQA1*01:02-B1*06:02L
  source 1..14: note = Severe acute respiratory syndrome coronavirus 2
TTKGGRFVLALLSD

SEQ ID NO: 18207 - protein, 12 aa, Severe acute respiratory syndrome-related coronavirus
  REGION 1..12: note = Table B: HLA-DQA1*01:02-B1*06:02L HLA-DPA1*01:03-B1*03:01L HLA-DPA1*03:01-B1*04:02L HLA-DPA1*01:03-B1*04:01L HLA-DPA1*01:03-B1*04:02L HLA-DRB1*12:01L HLA-DPA1*02:01-B1*13:01L HLA-DPA1*03:01-B1*105:01L
  REGION 1..12: note = CONT. FROM ABOVE: HLA-DPA1*01:03-B1*104:01L HLA-DPA1*01:02-B1*04 :01L HLA-DRB1*16:01L HLA-DQA1*01:03-B1*06:01L HLA-DRB1*15:03L
  source 1..12: note = Severe acute respiratory syndrome coronavirus 2
GGRFVLALLSDL

SEQ ID NO: 18208 - protein, 12 aa, Severe acute respiratory syndrome-related coronavirus
  REGION 1..12: note = Table B: HLA-DQA1*01:02-B1*06:02L HLA-DQA1*01-B1*05L HLA-DPA1*01:03-B1*04:01L HLA-DPA1*01:03-B1*04:02L HLA-DRB1*16:01L HLA-DQA1*01:03-B1*06:01L HLA-DRB1*04:08L HLA-DRB1*15:03L
  source 1..12: note = Severe acute respiratory syndrome coronavirus 2
GRFVLALLSDLQ

SEQ ID NO: 18209 - protein, 10 aa, Severe acute respiratory syndrome-related coronavirus
  REGION 1..10: note = Table B: HLA-DQA1*01:02-B1*06:02L
  source 1..10: note = Severe acute respiratory syndrome coronavirus 2
DLQDLKWARF

SEQ ID NO: 18210 - protein, 12 aa, Severe acute respiratory syndrome-related coronavirus
  REGION 1..12: note = Table B: HLA-DQA1*01:02-B1*06:02L HLA-DPA1*03:01-B1*04:02L HLA-DPA1*03:01-B1*105:01L HLA-DRB1*16:01L HLA-DRB1*04:08L
  source 1..12: note = Severe acute respiratory syndrome coronavirus 2
QDLKWARFPKSD

SEQ ID NO: 18211 - protein, 14 aa, Severe acute respiratory syndrome-related coronavirus
  REGION 1..14: note = Table B: HLA-DQA1*01:02-B1*06:02L
  source 1..14: note = Severe acute respiratory syndrome coronavirus 2
PKSDGTGTIYTELE

SEQ ID NO: 18212 - protein, 11 aa, Severe acute respiratory syndrome-related coronavirus
  REGION 1..11: note = Table B: HLA-DQA1*01:02-B1*06:02L HLA-DQA1*02:01-B1*03:03L
  source 1..11: note = Severe acute respiratory syndrome coronavirus 2
TPKGPKVKYLY

SEQ ID NO: 18213 - protein, 11 aa, Severe acute respiratory syndrome-related coronavirus
  REGION 1..11: note = Table B: HLA-DQA1*01:02-B1*06:02L HLA-DPA1*03:01-B1*04:02L HLA-DPA1*03:01-B1*105:01L HLA-DQA1*03:01-B1*03:02L HLA-DPA1*01:02-B1*04:01L HLA-DRB1*15:03L
  source 1..11: note = Severe acute respiratory syndrome coronavirus 2
YLYFIKGLNNL

SEQ ID NO: 18214 - protein, 12 aa, Severe acute respiratory syndrome-related coronavirus
  REGION 1..12: note = Table B: HLA-DQA1*01:02-B1*06:02L
  source 1..12: note = Severe acute respiratory syndrome coronavirus 2
GLNNLNRGMVLG

SEQ ID NO: 18215 - protein, 10 aa, Severe acute respiratory syndrome-related coronavirus
  REGION 1..10: note = Table B: HLA-DQA1*01:02-B1*06:02L HLA-DQA1*01:03-B1*06:01L HLA-DQA1*02:01-B1*03:03L
  source 1..10: note = Severe acute respiratory syndrome coronavirus 2
LNRGMVLGSL

SEQ ID NO: 18216 - protein, 12 aa, Severe acute respiratory syndrome-related coronavirus
  REGION 1..12: note = Table B: HLA-DQA1*01:02-B1*06:02L
  source 1..12: note = Severe acute respiratory syndrome coronavirus 2
NRGMVLGSLAAT

SEQ ID NO: 18217 - protein, 14 aa, Severe acute respiratory syndrome-related coronavirus
  REGION 1..14: note = Table B: HLA-DQA1*01:02-B1*06:02L HLA-DRB1*01:02L HLA-DPA1*03:01-B1*04:02L HLA-DQA1*01-B1*05L HLA-DRB1*12:01L HLA-DRB1*16:01L
  source 1..14: note = Severe acute respiratory syndrome coronavirus 2
STVLSFCAFAVDAA

SEQ ID NO: 18218 - protein, 12 aa, Severe acute respiratory syndrome-related coronavirus
  REGION 1..12: note = Table B: HLA-DQA1*01:02-B1*06:02L HLA-DPA1*03:01-B1*04:02L HLA-DPA1*01:03-B1*04:02L HLA-DPA1*03:01-B1*105:01L HLA-DPA1*01:02-B1*04:01L HLA-DRB1*04:08L HLA-DQA1*02:01-B1*03:03L
  source 1..12: note = Severe acute respiratory syndrome coronavirus 2
LSFCAFAVDAAK

SEQ ID NO: 18219 - protein, 12 aa, Severe acute respiratory syndrome-related coronavirus
  REGION 1..12: note = Table B: HLA-DQA1*01:02-B1*06:02L
  source 1..12: note = Severe acute respiratory syndrome coronavirus 2
SFCAFAVDAAKA

SEQ ID NO: 18220 - protein, 11 aa, Severe acute respiratory syndrome-related coronavirus
  REGION 1..11: note = Table B: HLA-DQA1*01:02-B1*06:02L HLA-DPA1*03:01-B1*04:02L HLA-DRB1*04:10L HLA-DPA1*01:03-B1*04:02L
  source 1..11: note = Severe acute respiratory syndrome coronavirus 2
FAVDAAKAYKD

SEQ ID NO: 18221 - protein, 13 aa, Severe acute respiratory syndrome-related coronavirus
  REGION 1..13: note = Table B: HLA-DQA1*01:02-B1*06:02L
  source 1..13: note = Severe acute respiratory syndrome coronavirus 2
QPITNCVKMLCTH

SEQ ID NO: 18222 - protein, 14 aa, Severe acute respiratory syndrome-related coronavirus
  REGION 1..14: note = Table B: HLA-DQA1*01:02-B1*06:02L
  source 1..14: note = Severe acute respiratory syndrome coronavirus 2
PITNCVKMLCTHTG

SEQ ID NO: 18223 - protein, 14 aa, Severe acute respiratory syndrome-related coronavirus
  REGION 1..14: note = Table B: HLA-DQA1*01:02-B1*06:02L HLA-DRB1*01:02L
  source 1..14: note = Severe acute respiratory syndrome coronavirus 2
TNCVKMLCTHTGTG

SEQ ID NO: 18224 - protein, 13 aa, Severe acute respiratory syndrome-related coronavirus
  REGION 1..13: note = Table B: HLA-DQA1*01:02-B1*06:02L
  source 1..13: note = Severe acute respiratory syndrome coronavirus 2
VKMLCTHTGTGQA

SEQ ID NO: 18225 - protein, 12 aa, Severe acute respiratory syndrome-related coronavirus
  REGION 1..12: note = Table B: HLA-DQA1*01:02-B1*06:02L HLA-DQA1*01-B1*05L HLA-DRB1*12:01L HLA-DQA1*05:05-B1*03:01L
  source 1..12: note = Severe acute respiratory syndrome coronavirus 2
ITVTPEANMDQE

SEQ ID NO: 18226 - protein, 14 aa, Severe acute respiratory syndrome-related coronavirus
  REGION 1..14: note = Table B: HLA-DQA1*01:02-B1*06:02L HLA-DPA1*03:01-B1*105:01L HLA-DQA1*05:05-B1*03:01L HLA-DQA1*01:03-B1*06:01L HLA-DQA1*02:01-B1*03:03L
  source 1..14: note = Severe acute respiratory syndrome coronavirus 2
PEANMDQESFGGAS

SEQ ID NO: 18227 - protein, 11 aa, Severe acute respiratory syndrome-related coronavirus
  REGION 1..11: note = Table B: HLA-DQA1*01:02-B1*06:02L HLA-DQA1*05:05-B1*03:19L
  source 1..11: note = Severe acute respiratory syndrome coronavirus 2
ESFGGASCCLY

SEQ ID NO: 18228 - protein, 12 aa, Severe acute respiratory syndrome-related coronavirus
  REGION 1..12: note = Table B: HLA-DQA1*01:02-B1*06:02L
  source 1..12: note = Severe acute respiratory syndrome coronavirus 2
SFGGASCCLYCR

SEQ ID NO: 18229 - protein, 17 aa, Severe acute respiratory syndrome-related coronavirus
  REGION 1..17: note = Table B: HLA-DQA1*01:02-B1*06:02L
  source 1..17: note = Severe acute respiratory syndrome coronavirus 2
IDHPNPKGFCDLKGKYV

SEQ ID NO: 18230 - protein, 12 aa, Severe acute respiratory syndrome-related coronavirus
  REGION 1..12: note = Table B: HLA-DQA1*01:02-B1*06:02L HLA-DQA1*03:01-B1*03:02L HLA-DQA1*02:01-B1*03:03L
  source 1..12: note = Severe acute respiratory syndrome coronavirus 2
DLKGKYVQIPTT

SEQ ID NO: 18231 - protein, 13 aa, Severe acute respiratory syndrome-related coronavirus
  REGION 1..13: note = Table B: HLA-DQA1*01:02-B1*06:02L HLA-DQA1*01:03-B1*06:01L
  source 1..13: note = Severe acute respiratory syndrome coronavirus 2
IPTTCANDPVGFT

SEQ ID NO: 18232 - protein, 12 aa, Severe acute respiratory syndrome-related coronavirus
  REGION 1..12: note = Table B: HLA-DQA1*01:02-B1*06:02L HLA-DPA1*03:01-B1*105:01L
  source 1..12: note = Severe acute respiratory syndrome coronavirus 2
FTLKNTVCTVCG

SEQ ID NO: 18233 - protein, 13 aa, Severe acute respiratory syndrome-related coronavirus
  REGION 1..13: note = Table B: HLA-DQA1*01:02-B1*06:02L
  source 1..13: note = Severe acute respiratory syndrome coronavirus 2
LKNTVCTVCGMWK

SEQ ID NO: 18234 - protein, 12 aa, Severe acute respiratory syndrome-related coronavirus
  REGION 1..12: note = Table B: HLA-DQA1*01:02-B1*06:02L
  source 1..12: note = Severe acute respiratory syndrome coronavirus 2
NTVCTVCGMWKG

SEQ ID NO: 18235 - protein, 10 aa, Severe acute respiratory syndrome-related coronavirus
  REGION 1..10: note = Table B: HLA-DQA1*01:02-B1*06:02L HLA-DQA1*01:03-B1*06:01L
  source 1..10: note = Severe acute respiratory syndrome coronavirus 2
TVCGMWKGYG

SEQ ID NO: 18236 - protein, 13 aa, Severe acute respiratory syndrome-related coronavirus
  REGION 1..13: note = Table B: HLA-DQA1*01:02-B1*06:02L
  source 1..13: note = Severe acute respiratory syndrome coronavirus 2
MWKGYGCSCDQLR

SEQ ID NO: 18237 - protein, 12 aa, Severe acute respiratory syndrome-related coronavirus
  REGION 1..12: note = Table B: HLA-DQA1*01:02-B1*06:02L
  source 1..12: note = Severe acute respiratory syndrome coronavirus 2
GYGCSCDQLREP

SEQ ID NO: 18238 - protein, 13 aa, Severe acute respiratory syndrome-related coronavirus
  REGION 1..13: note = Table B: HLA-DQA1*01:02-B1*06:02L
  source 1..13: note = Severe acute respiratory syndrome coronavirus 2
QLREPMLQSADAQ

SEQ ID NO: 18239 - protein, 11 aa, Severe acute respiratory syndrome-related coronavirus
  REGION 1..11: note = Table B: HLA-DQA1*01:02-B1*06:02L HLA-DPA1*03:01-B1*04:02L HLA-DQA1*05:05-B1*03:116L HLA-DPA1*02:01-B1*13:01L HLA-DPA1*03:01-B1*105:01L HLA-DPA1*01:02-B1*04:01L HLA-DRB1*15:03L
  source 1..11: note = Severe acute respiratory syndrome coronavirus 2
SADAQSFLNRV

SEQ ID NO: 18240 - protein, 12 aa, Severe acute respiratory syndrome-related coronavirus
  REGION 1..12: note = Table B: HLA-DQA1*01:02-B1*06:02L
  source 1..12: note = Severe acute respiratory syndrome coronavirus 2
ADAQSFLNRVCG

SEQ ID NO: 18241 - protein, 13 aa, Severe acute respiratory syndrome-related coronavirus
  REGION 1..13: note = Table B: HLA-DQA1*01:02-B1*06:02L
  source 1..13: note = Severe acute respiratory syndrome coronavirus 2
DAQSFLNRVCGVS

SEQ ID NO: 18242 - protein, 14 aa, Severe acute respiratory syndrome-related coronavirus
  REGION 1..14: note = Table B: HLA-DQA1*01:02-B1*06:02L
  source 1..14: note = Severe acute respiratory syndrome coronavirus 2
AQSFLNRVCGVSAA

SEQ ID NO: 18243 - protein, 10 aa, Severe acute respiratory syndrome-related coronavirus
  REGION 1..10: note = Table B: HLA-DQA1*01:02-B1*06:02L HLA-DQA1*01:03-B1*06:01L
  source 1..10: note = Severe acute respiratory syndrome coronavirus 2
NRVCGVSAAR

SEQ ID NO: 18244 - protein, 12 aa, Severe acute respiratory syndrome-related coronavirus
  REGION 1..12: note = Table B: HLA-DQA1*01:02-B1*06:02L HLA-DQA1*05:05-B1*03:01L
  source 1..12: note = Severe acute respiratory syndrome coronavirus 2
RLTPCGTGTSTD

SEQ ID NO: 18245 - protein, 14 aa, Severe acute respiratory syndrome-related coronavirus
  REGION 1..14: note = Table B: HLA-DQA1*01:02-B1*06:02L HLA-DQA1*05:05-B1*03:01L HLA-DQA1*01:03-B1*06:01L
  source 1..14: note = Severe acute respiratory syndrome coronavirus 2
LTPCGTGTSTDVVY

SEQ ID NO: 18246 - protein, 11 aa, Severe acute respiratory syndrome-related coronavirus
  REGION 1..11: note = Table B: HLA-DQA1*01:02-B1*06:02L HLA-DPA1*03:01-B1*04:02L HLA-DPA1*03:01-B1*105:01L HLA-DPA1*01:02-B1*04:01L
  source 1..11: note = Severe acute respiratory syndrome coronavirus 2
AFDIYNDKVAG

SEQ ID NO: 18247 - protein, 12 aa, Severe acute respiratory syndrome-related coronavirus
  REGION 1..12: note = Table B: HLA-DQA1*01:02-B1*06:02L HLA-DPA1*02:01-B1*13:01L HLA-DQA1*01:03-B1*06:01L
  source 1..12: note = Severe acute respiratory syndrome coronavirus 2
IYNDKVAGFAKF

SEQ ID NO: 18248 - protein, 12 aa, Severe acute respiratory syndrome-related coronavirus
  REGION 1..12: note = Table B: HLA-DQA1*01:02-B1*06:02L
  source 1..12: note = Severe acute respiratory syndrome coronavirus 2
FLKTNCCRFQEK

SEQ ID NO: 18249 - protein, 12 aa, Severe acute respiratory syndrome-related coronavirus
  REGION 1..12: note = Table B: HLA-DQA1*01:02-B1*06:02L
  source 1..12: note = Severe acute respiratory syndrome coronavirus 2
LKTNCCRFQEKD

SEQ ID NO: 18250 - protein, 12 aa, Severe acute respiratory syndrome-related coronavirus
  REGION 1..12: note = Table B: HLA-DQA1*01:02-B1*06:02L
  source 1..12: note = Severe acute respiratory syndrome coronavirus 2
KTNCCRFQEKDE

SEQ ID NO: 18251 - protein, 14 aa, Severe acute respiratory syndrome-related coronavirus
  REGION 1..14: note = Table B: HLA-DQA1*01:02-B1*06:02L
  source 1..14: note = Severe acute respiratory syndrome coronavirus 2
TNCCRFQEKDEDDN

SEQ ID NO: 18252 - protein, 13 aa, Severe acute respiratory syndrome-related coronavirus
  REGION 1..13: note = Table B: HLA-DQA1*01:02-B1*06:02L HLA-DQA1*01:03-B1*06:01L
  source 1..13: note = Severe acute respiratory syndrome coronavirus 2
EDDNLIDSYFVVK

SEQ ID NO: 18253 - protein, 13 aa, Severe acute respiratory syndrome-related coronavirus
  REGION 1..13: note = Table B: HLA-DQA1*01:02-B1*06:02L HLA-DQA1*02:01-B1*03:03L
  source 1..13: note = Severe acute respiratory syndrome coronavirus 2
YNLLKDCPAVAKH

SEQ ID NO: 18254 - protein, 10 aa, Severe acute respiratory syndrome-related coronavirus
  REGION 1..10: note = Table B: HLA-DQA1*01:02-B1*06:02L HLA-DQA1*01:03-B1*06:01L HLA-DQA1*02:01-B1*03:03L
  source 1..10: note = Severe acute respiratory syndrome coronavirus 2
DCPAVAKHDF

SEQ ID NO: 18255 - protein, 10 aa, Severe acute respiratory syndrome-related coronavirus
  REGION 1..10: note = Table B: HLA-DQA1*01:02-B1*06:02L HLA-DQA1*01:03-B1*06:01L HLA-DQA1*02:01-B1*03:03L
  source 1..10: note = Severe acute respiratory syndrome coronavirus 2
AVAKHDFFKF

SEQ ID NO: 18256 - protein, 14 aa, Severe acute respiratory syndrome-related coronavirus
  REGION 1..14: note = Table B: HLA-DQA1*01:02-B1*06:02L HLA-DQA1*05:01-B1*02:01L HLA-DPA1*03:01-B1*105:01L HLA-DPA1*01:02-B1*04:01L
  source 1..14: note = Severe acute respiratory syndrome coronavirus 2
DFFKFRIDGDMVPH

SEQ ID NO: 18257 - protein, 11 aa, Severe acute respiratory syndrome-related coronavirus
  REGION 1..11: note = Table B: HLA-DQA1*01:02-B1*06:02L HLA-DQA1*05:01-B1*02:01L HLA-DPA1*02:01-B1*13:01L HLA-DQA1*01:03-B1*06:01L
  source 1..11: note = Severe acute respiratory syndrome coronavirus 2
FRIDGDMVPHI

SEQ ID NO: 18258 - protein, 11 aa, Severe acute respiratory syndrome-related coronavirus
  REGION 1..11: note = Table B: HLA-DQA1*01:02-B1*06:02L
  source 1..11: note = Severe acute respiratory syndrome coronavirus 2
DMVPHISRQRL

SEQ ID NO: 18259 - protein, 10 aa, Severe acute respiratory syndrome-related coronavirus
  REGION 1..10: note = Table B: HLA-DQA1*01:02-B1*06:02L HLA-DQA1*05:05-B1*03:19L HLA-DQA1*05:01-B1*02:01L HLA-DQA1*02:01-B1*03:03L
  source 1..10: note = Severe acute respiratory syndrome coronavirus 2
TKYTMADLVY

SEQ ID NO: 18260 - protein, 12 aa, Severe acute respiratory syndrome-related coronavirus
  REGION 1..12: note = Table B: HLA-DQA1*01:02-B1*06:02L HLA-DRB1*08:04L HLA-DRB1*16:01L HLA-DRB1*04:08L
  source 1..12: note = Severe acute respiratory syndrome coronavirus 2
LVYALRHFDEGN

SEQ ID NO: 18261 - protein, 13 aa, Severe acute respiratory syndrome-related coronavirus
  REGION 1..13: note = Table B: HLA-DQA1*01:02-B1*06:02L HLA-DQA1*01:03-B1*06:01L
  source 1..13: note = Severe acute respiratory syndrome coronavirus 2
FDEGNCDTLKEIL

SEQ ID NO: 18262 - protein, 14 aa, Severe acute respiratory syndrome-related coronavirus
  REGION 1..14: note = Table B: HLA-DQA1*01:02-B1*06:02L HLA-DPA1*03:01-B1*105:01L HLA-DQA1*01:03-B1*06:01L HLA-DRB1*15:03L
  source 1..14: note = Severe acute respiratory syndrome coronavirus 2
DEGNCDTLKEILVT

SEQ ID NO: 18263 - protein, 14 aa, Severe acute respiratory syndrome-related coronavirus
  REGION 1..14: note = Table B: HLA-DQA1*01:02-B1*06:02L HLA-DPA1*02:01-B1*13:01L HLA-DPA1*03:01-B1*105:01L HLA-DRB1*15:03L
  source 1..14: note = Severe acute respiratory syndrome coronavirus 2
ILVTYNCCDDDYFN

SEQ ID NO: 18264 - protein, 12 aa, Severe acute respiratory syndrome-related coronavirus
  REGION 1..12: note = Table B: HLA-DQA1*01:02-B1*06:02L HLA-DRB1*08:01L HLA-DQA1*01-B1*05L HLA-DQA1*03:01-B1*03:02L
  source 1..12: note = Severe acute respiratory syndrome coronavirus 2
DDDYFNKKDWYD

SEQ ID NO: 18265 - protein, 10 aa, Severe acute respiratory syndrome-related coronavirus
  REGION 1..10: note = Table B: HLA-DQA1*01:02-B1*06:02L HLA-DPA1*02:01-B1*13:01L HLA-DQA1*01:03-B1*06:01L
  source 1..10: note = Severe acute respiratory syndrome coronavirus 2
YFNKKDWYDF

SEQ ID NO: 18266 - protein, 13 aa, Severe acute respiratory syndrome-related coronavirus
  REGION 1..13: note = Table B: HLA-DQA1*01:02-B1*06:02L HLA-DQA1*01:01-B1*05:01L HLA-DPA1*03:01-B1*105:01L HLA-DPA1*01:02-B1*04:01L HLA-DQA1*01:03-B1*06:01L HLA-DRB1*04:08L HLA-DQA1*02:01-B1*03:03L HLA-DRB1*15:03L
  source 1..13: note = Severe acute respiratory syndrome coronavirus 2
NKKDWYDFVENPD

SEQ ID NO: 18267 - protein, 12 aa, Severe acute respiratory syndrome-related coronavirus
  REGION 1..12: note = Table B: HLA-DQA1*01:02-B1*06:02L HLA-DPA1*03:01-B1*04:02L HLA-DRB1*12:01L HLA-DPA1*02:01-B1*13:01L HLA-DPA1*03:01-B1*105:01L HLA-DRB1*16:01L HLA-DQA1*01:03-B1*06:01L HLA-DRB1*15:03L
  source 1..12: note = Severe acute respiratory syndrome coronavirus 2
DWYDFVENPDIL

SEQ ID NO: 18268 - protein, 10 aa, Severe acute respiratory syndrome-related coronavirus
  REGION 1..10: note = Table B: HLA-DQA1*01:02-B1*06:02L
  source 1..10: note = Severe acute respiratory syndrome coronavirus 2
NLGERVRQAL

SEQ ID NO: 18269 - protein, 10 aa, Severe acute respiratory syndrome-related coronavirus
  REGION 1..10: note = Table B: HLA-DQA1*01:02-B1*06:02L HLA-DPA1*03:01-B1*105:01L HLA-DPA1*01:02-B1*04:01L HLA-DQA1*01:03-B1*06:01L HLA-DQA1*02:01-B1*03:03L
  source 1..10: note = Severe acute respiratory syndrome coronavirus 2
VRQALLKTVQ

SEQ ID NO: 18270 - protein, 12 aa, Severe acute respiratory syndrome-related coronavirus
  REGION 1..12: note = Table B: HLA-DQA1*01:02-B1*06:02L HLA-DPA1*03:01-B1*04:02L HLA-DPA1*01:03-B1*04:01L HLA-DPA1*01:03-B1*04:02L HLA-DPA1*01:02-B1*04:01L HLA-DQA1*01:03-B1*06:01L
  source 1..12: note = Severe acute respiratory syndrome coronavirus 2
ALLKTVQFCDAM

SEQ ID NO: 18271 - protein, 12 aa, Severe acute respiratory syndrome-related coronavirus
  REGION 1..12: note = Table B: HLA-DQA1*01:02-B1*06:02L HLA-DQA1*01:03-B1*06:01L HLA-DRB1*04:08L
  source 1..12: note = Severe acute respiratory syndrome coronavirus 2
LLKTVQFCDAMR

SEQ ID NO: 18272 - protein, 12 aa, Severe acute respiratory syndrome-related coronavirus
  REGION 1..12: note = Table B: HLA-DQA1*01:02-B1*06:02L HLA-DQA1*03:01-B1*03:02L HLA-DQA1*01:03-B1*06:01L HLA-DQA1*02:01-B1*03:03L
  source 1..12: note = Severe acute respiratory syndrome coronavirus 2
NAGIVGVLTLDN

SEQ ID NO: 18273 - protein, 11 aa, Severe acute respiratory syndrome-related coronavirus
  REGION 1..11: note = Table B: HLA-DQA1*01:02-B1*06:02L HLA-DQA1*05:01-B1*02:01L
  source 1..11: note = Severe acute respiratory syndrome coronavirus 2
TPGSGVPVVDS

SEQ ID NO: 18274 - protein, 11 aa, Severe acute respiratory syndrome-related coronavirus
  REGION 1..11: note = Table B: HLA-DQA1*01:02-B1*06:02L HLA-DQA1*05:01-B1*02:01L HLA-DQA1*02:01-B1*03:03L
  source 1..11: note = Severe acute respiratory syndrome coronavirus 2
PGSGVPVVDSY

SEQ ID NO: 18275 - protein, 12 aa, Severe acute respiratory syndrome-related coronavirus
  REGION 1..12: note = Table B: HLA-DQA1*01:02-B1*06:02L HLA-DRB1*01:02L HLA-DPA1*03:01-B1*105:01L
  source 1..12: note = Severe acute respiratory syndrome coronavirus 2
YSLLMPILTLTR

SEQ ID NO: 18276 - protein, 12 aa, Severe acute respiratory syndrome-related coronavirus
  REGION 1..12: note = Table B: HLA-DQA1*01:02-B1*06:02L
  source 1..12: note = Severe acute respiratory syndrome coronavirus 2
SLLMPILTLTRA

SEQ ID NO: 18277 - protein, 12 aa, Severe acute respiratory syndrome-related coronavirus
  REGION 1..12: note = Table B: HLA-DQA1*01:02-B1*06:02L HLA-DRB1*12:01L HLA-DRB1*15:03L
  source 1..12: note = Severe acute respiratory syndrome coronavirus 2
LMPILTLTRALT

SEQ ID NO: 18278 - protein, 12 aa, Severe acute respiratory syndrome-related coronavirus
  REGION 1..12: note = Table B: HLA-DQA1*01:02-B1*06:02L
  source 1..12: note = Severe acute respiratory syndrome coronavirus 2
LTAESHVDTDLT

SEQ ID NO: 18279 - protein, 11 aa, Severe acute respiratory syndrome-related coronavirus
  REGION 1..11: note = Table B: HLA-DQA1*01:02-B1*06:02L
  source 1..11: note = Severe acute respiratory syndrome coronavirus 2
DTDLTKPYIKW

SEQ ID NO: 18280 - protein, 14 aa, Severe acute respiratory syndrome-related coronavirus
  REGION 1..14: note = Table B: HLA-DQA1*01:02-B1*06:02L
  source 1..14: note = Severe acute respiratory syndrome coronavirus 2
TDLTKPYIKWDLLK

SEQ ID NO: 18281 - protein, 10 aa, Severe acute respiratory syndrome-related coronavirus
  REGION 1..10: note = Table B: HLA-DQA1*01:02-B1*06:02L HLA-DQA1*01:03-B1*06:01L
  source 1..10: note = Severe acute respiratory syndrome coronavirus 2
DFTEERLKLF

SEQ ID NO: 18282 - protein, 12 aa, Severe acute respiratory syndrome-related coronavirus
  REGION 1..12: note = Table B: HLA-DQA1*01:02-B1*06:02L HLA-DRB1*01:02L HLA-DRB1*08:04L HLA-DPA1*03:01-B1*04:02L HLA-DRB1*14:01L HLA-DRB1*12:01L HLA-DPA1*02:01-B1*13:01L HLA-DRB1*15:03L
  source 1..12: note = Severe acute respiratory syndrome coronavirus 2
YFKYWDQTYHPN

SEQ ID NO: 18283 - protein, 12 aa, Severe acute respiratory syndrome-related coronavirus
  REGION 1..12: note = Table B: HLA-DQA1*01:02-B1*06:02L HLA-DPA1*03:01-B1*105:01L HLA-DQA1*05:05-B1*03:01L HLA-DQA1*01:03-B1*06:01L
  source 1..12: note = Severe acute respiratory syndrome coronavirus 2
YWDQTYHPNCVN

SEQ ID NO: 18284 - protein, 14 aa, Severe acute respiratory syndrome-related coronavirus
  REGION 1..14: note = Table B: HLA-DQA1*01:02-B1*06:02L HLA-DRB1*01:02L HLA-DRB1*14:01L HLA-DRB1*15:03L
  source 1..14: note = Severe acute respiratory syndrome coronavirus 2
DQTYHPNCVNCLDD

SEQ ID NO: 18285 - protein, 12 aa, Severe acute respiratory syndrome-related coronavirus
  REGION 1..12: note = Table B: HLA-DQA1*01:02-B1*06:02L
  source 1..12: note = Severe acute respiratory syndrome coronavirus 2
YHPNCVNCLDDR

SEQ ID NO: 18286 - protein, 12 aa, Severe acute respiratory syndrome-related coronavirus
  REGION 1..12: note = Table B: HLA-DQA1*01:02-B1*06:02L
  source 1..12: note = Severe acute respiratory syndrome coronavirus 2
DDRCILHCANFN

SEQ ID NO: 18287 - protein, 10 aa, Severe acute respiratory syndrome-related coronavirus
  REGION 1..10: note = Table B: HLA-DQA1*01:02-B1*06:02L HLA-DPA1*03:01-B1*04:02L HLA-DQA1*01-B1*05L HLA-DPA1*01:03-B1*04:01L HLA-DPA1*01:03-B1*04:02L HLA-DRB1*12:01L HLA-DPA1*03:01-B1*105:01L HLA-DPA1*01:02-B1*04:01L
  REGION 1..10: note = CONT. FROM ABOVE: HLA-DRB1*16:01L HLA-DQA1*01:03-B1*06:01L HLA-D RB1*04:08L HLA-DRB1*15:03L
  source 1..10: note = Severe acute respiratory syndrome coronavirus 2
ILHCANFNVL

SEQ ID NO: 18288 - protein, 14 aa, Severe acute respiratory syndrome-related coronavirus
  REGION 1..14: note = Table B: HLA-DQA1*01:02-B1*06:02L HLA-DRB1*01:02L HLA-DRB1*14:01L HLA-DQA1*05:01-B1*02:01L HLA-DQA1*05:05-B1*03:01L HLA-DRB1*16:01L HLA-DQA1*02:01-B1*03:03L
  source 1..14: note = Severe acute respiratory syndrome coronavirus 2
ANFNVLFSTVFPPT

SEQ ID NO: 18289 - protein, 12 aa, Severe acute respiratory syndrome-related coronavirus
  REGION 1..12: note = Table B: HLA-DQA1*01:02-B1*06:02L HLA-DPA1*03:01-B1*04:02L HLA-DPA1*03:01-B1*105:01L HLA-DPA1*01:02-B1*04:01L HLA-DQA1*01:03-B1*06:01L
  source 1..12: note = Severe acute respiratory syndrome coronavirus 2
NVLFSTVFPPTS

SEQ ID NO: 18290 - protein, 10 aa, Severe acute respiratory syndrome-related coronavirus
  REGION 1..10: note = Table B: HLA-DQA1*01:02-B1*06:02L HLA-DQA1*05:05-B1*03:19L HLA-DPA1*02:01-B1*13:01L HLA-DPA1*03:01-B1*105:01L HLA-DQA1*01:03-B1*06:01L HLA-DQA1*02:01-B1*03:03L HLA-DRB1*15:03L
  source 1..10: note = Severe acute respiratory syndrome coronavirus 2
FSTVFPPTSF

SEQ ID NO: 18291 - protein, 10 aa, Severe acute respiratory syndrome-related coronavirus
  REGION 1..10: note = Table B: HLA-DQA1*01:02-B1*06:02L HLA-DQA1*05:05-B1*03:19L HLA-DQA1*02:01-B1*03:03L
  source 1..10: note = Severe acute respiratory syndrome coronavirus 2
TSFGPLVRKI

SEQ ID NO: 18292 - protein, 12 aa, Severe acute respiratory syndrome-related coronavirus
  REGION 1..12: note = Table B: HLA-DQA1*01:02-B1*06:02L HLA-DRB1*14:01L HLA-DRB1*08:01L
  source 1..12: note = Severe acute respiratory syndrome coronavirus 2
FGPLVRKIFVDG

SEQ ID NO: 18293 - protein, 14 aa, Severe acute respiratory syndrome-related coronavirus
  REGION 1..14: note = Table B: HLA-DQA1*01:02-B1*06:02L HLA-DRB1*01:02L HLA-DRB1*12:01L HLA-DPA1*03:01-B1*105:01L HLA-DRB1*15:03L
  source 1..14: note = Severe acute respiratory syndrome coronavirus 2
VSTGYHFRELGVVH

SEQ ID NO: 18294 - protein, 13 aa, Severe acute respiratory syndrome-related coronavirus
  REGION 1..13: note = Table B: HLA-DQA1*01:02-B1*06:02L HLA-DRB1*11:01L HLA-DPA1*03:01-B1*105:01L HLA-DRB1*15:03L
  source 1..13: note = Severe acute respiratory syndrome coronavirus 2
TGYHFRELGVVHN

SEQ ID NO: 18295 - protein, 12 aa, Severe acute respiratory syndrome-related coronavirus
  REGION 1..12: note = Table B: HLA-DQA1*01:02-B1*06:02L HLA-DRB1*01:01L HLA-DRB1*08:01L HLA-DRB1*11:01L HLA-DRB1*12:01L HLA-DPA1*03:01-B1*105:01L
  source 1..12: note = Severe acute respiratory syndrome coronavirus 2
HFRELGVVHNQD

SEQ ID NO: 18296 - protein, 12 aa, Severe acute respiratory syndrome-related coronavirus
  REGION 1..12: note = Table B: HLA-DQA1*01:02-B1*06:02L
  source 1..12: note = Severe acute respiratory syndrome coronavirus 2
VHNQDVNLHSSR

SEQ ID NO: 18297 - protein, 12 aa, Severe acute respiratory syndrome-related coronavirus
  REGION 1..12: note = Table B: HLA-DQA1*01:02-B1*06:02L
  source 1..12: note = Severe acute respiratory syndrome coronavirus 2
HNQDVNLHSSRL

SEQ ID NO: 18298 - protein, 11 aa, Severe acute respiratory syndrome-related coronavirus
  REGION 1..11: note = Table B: HLA-DQA1*01:02-B1*06:02L HLA-DQA1*01:03-B1*06:01L
  source 1..11: note = Severe acute respiratory syndrome coronavirus 2
DVNLHSSRLSF

SEQ ID NO: 18299 - protein, 12 aa, Severe acute respiratory syndrome-related coronavirus
  REGION 1..12: note = Table B: HLA-DQA1*01:02-B1*06:02L HLA-DQA1*01:03-B1*06:01L
  source 1..12: note = Severe acute respiratory syndrome coronavirus 2
NLHSSRLSFKEL

SEQ ID NO: 18300 - protein, 10 aa, Severe acute respiratory syndrome-related coronavirus
  REGION 1..10: note = Table B: HLA-DQA1*01:02-B1*06:02L HLA-DRB1*03:01L HLA-DQA1*05:05-B1*03:19L HLA-DQA1*02:01-B1*03:03L
  source 1..10: note = Severe acute respiratory syndrome coronavirus 2
RLSFKELLVY

SEQ ID NO: 18301 - protein, 12 aa, Severe acute respiratory syndrome-related coronavirus
  REGION 1..12: note = Table B: HLA-DQA1*01:02-B1*06:02L HLA-DRB1*01:01L HLA-DRB1*08:04L HLA-DPA1*01:03-B1*03:01L HLA-DRB1*11:04L HLA-DRB1*14:02L HLA-DQA1*01:01-B1*05:01L HLA-DRB1*08:01L HLA-DRB1*11:01L HLA-DRB5*01:01L HLA-DRB4*02:01NL HLA-DRB4*01:01L
  REGION 1..12: note = CONT. FROM ABOVE: HLA-DPA1*01:03-B1*04:01L HLA-DRB1*04:10L HLA-D PA1*01:03-B1*04:02L HLA-DRB3*01:01L HLA-DPA1*02:01-B1*13:01L HLA -DPA1*03:01-B1*105:01L HLA-DRB1*14:54L HLA-DPA1*01:03-B1*104:01L HLA-DRB1*14:17L HLA-DRB1*10:01L HLA-DRB1*04:08L HLA-DRB1*08:03L
  source 1..12: note = Severe acute respiratory syndrome coronavirus 2
DPAMHAASGNLL

SEQ ID NO: 18302 - protein, 14 aa, Severe acute respiratory syndrome-related coronavirus
  REGION 1..14: note = Table B: HLA-DQA1*01:02-B1*06:02L HLA-DPA1*01:03-B1*03:01L HLA-DPA1*02:01-B1*13:01L
  source 1..14: note = Severe acute respiratory syndrome coronavirus 2
LDKRTTCFSVAALT

SEQ ID NO: 18303 - protein, 14 aa, Severe acute respiratory syndrome-related coronavirus
  REGION 1..14: note = Table B: HLA-DQA1*01:02-B1*06:02L HLA-DPA1*01:03-B1*03:01L HLA-DPA1*02:01-B1*13:01L
  source 1..14: note = Severe acute respiratory syndrome coronavirus 2
DKRTTCFSVAALTN

SEQ ID NO: 18304 - protein, 13 aa, Severe acute respiratory syndrome-related coronavirus
  REGION 1..13: note = Table B: HLA-DQA1*01:02-B1*06:02L
  source 1..13: note = Severe acute respiratory syndrome coronavirus 2
RTTCFSVAALTNN

SEQ ID NO: 18305 - protein, 12 aa, Severe acute respiratory syndrome-related coronavirus
  REGION 1..12: note = Table B: HLA-DQA1*01:02-B1*06:02L HLA-DPA1*03:01-B1*105:01L HLA-DQA1*03:01-B1*03:02L HLA-DQA1*01:03-B1*06:01L HLA-DQA1*02:01-B1*03:03L
  source 1..12: note = Severe acute respiratory syndrome coronavirus 2
LTNNVAFQTVKP

SEQ ID NO: 18306 - protein, 12 aa, Severe acute respiratory syndrome-related coronavirus
  REGION 1..12: note = Table B: HLA-DQA1*01:02-B1*06:02L HLA-DQA1*01-B1*05L HLA-DQA1*05:01-B1*02:01L HLA-DPA1*03:01-B1*105:01L
  source 1..12: note = Severe acute respiratory syndrome coronavirus 2
PGNFNKDFYDFA

SEQ ID NO: 18307 - protein, 12 aa, Severe acute respiratory syndrome-related coronavirus
  REGION 1..12: note = Table B: HLA-DQA1*01:02-B1*06:02L HLA-DQA1*01:03-B1*06:01L
  source 1..12: note = Severe acute respiratory syndrome coronavirus 2
AVSKGFFKEGSS

SEQ ID NO: 18308 - protein, 12 aa, Severe acute respiratory syndrome-related coronavirus
  REGION 1..12: note = Table B: HLA-DQA1*01:02-B1*06:02L HLA-DRB1*08:01L HLA-DRB1*12:01L HLA-DRB1*04:08L
  source 1..12: note = Severe acute respiratory syndrome coronavirus 2
FFKEGSSVELKH

SEQ ID NO: 18309 - protein, 10 aa, Severe acute respiratory syndrome-related coronavirus
  REGION 1..10: note = Table B: HLA-DQA1*01:02-B1*06:02L HLA-DQA1*01:03-B1*06:01L HLA-DQA1*02:01-B1*03:03L
  source 1..10: note = Severe acute respiratory syndrome coronavirus 2
GSSVELKHFF

SEQ ID NO: 18310 - protein, 10 aa, Severe acute respiratory syndrome-related coronavirus
  REGION 1..10: note = Table B: HLA-DQA1*01:02-B1*06:02L HLA-DQA1*05:05-B1*03:19L HLA-DQA1*05:01-B1*02:01L HLA-DQA1*01:03-B1*06:01L HLA-DQA1*02:01-B1*03:03L
  source 1..10: note = Severe acute respiratory syndrome coronavirus 2
SSVELKHFFF

SEQ ID NO: 18311 - protein, 13 aa, Severe acute respiratory syndrome-related coronavirus
  REGION 1..13: note = Table B: HLA-DQA1*01:02-B1*06:02L HLA-DQA1*01-B1*05L HLA-DPA1*03:01-B1*105:01L HLA-DQA1*03:01-B1*03:02L HLA-DPA1*01:02-B1*04:01L HLA-DQA1*01:03-B1*06:01L
  source 1..13: note = Severe acute respiratory syndrome coronavirus 2
VELKHFFFAQDGN

SEQ ID NO: 18312 - protein, 10 aa, Severe acute respiratory syndrome-related coronavirus
  REGION 1..10: note = Table B: HLA-DQA1*01:02-B1*06:02L HLA-DQA1*05:05-B1*03:19L HLA-DQA1*05:01-B1*02:01L
  source 1..10: note = Severe acute respiratory syndrome coronavirus 2
GNAAISDYDY

SEQ ID NO: 18313 - protein, 12 aa, Severe acute respiratory syndrome-related coronavirus
  REGION 1..12: note = Table B: HLA-DQA1*01:02-B1*06:02L HLA-DPA1*03:01-B1*105:01L HLA-DQA1*01:03-B1*06:01L
  source 1..12: note = Severe acute respiratory syndrome coronavirus 2
YNLPTMCDIRQL

SEQ ID NO: 18314 - protein, 10 aa, Severe acute respiratory syndrome-related coronavirus
  REGION 1..10: note = Table B: HLA-DQA1*01:02-B1*06:02L HLA-DQA1*01:03-B1*06:01L
  source 1..10: note = Severe acute respiratory syndrome coronavirus 2
PTMCDIRQLL

SEQ ID NO: 18315 - protein, 14 aa, Severe acute respiratory syndrome-related coronavirus
  REGION 1..14: note = Table B: HLA-DQA1*01:02-B1*06:02L HLA-DQA1*05:05-B1*03:01L
  source 1..14: note = Severe acute respiratory syndrome coronavirus 2
FDCYDGGCINANQV

SEQ ID NO: 18316 - protein, 14 aa, Severe acute respiratory syndrome-related coronavirus
  REGION 1..14: note = Table B: HLA-DQA1*01:02-B1*06:02L
  source 1..14: note = Severe acute respiratory syndrome coronavirus 2
DCYDGGCINANQVI

SEQ ID NO: 18317 - protein, 13 aa, Severe acute respiratory syndrome-related coronavirus
  REGION 1..13: note = Table B: HLA-DQA1*01:02-B1*06:02L HLA-DQA1*05:05-B1*03:01L HLA-DQA1*01:03-B1*06:01L
  source 1..13: note = Severe acute respiratory syndrome coronavirus 2
YDGGCINANQVIV

SEQ ID NO: 18318 - protein, 12 aa, Severe acute respiratory syndrome-related coronavirus
  REGION 1..12: note = Table B: HLA-DQA1*01:02-B1*06:02L
  source 1..12: note = Severe acute respiratory syndrome coronavirus 2
IVNNLDKSAGFP

SEQ ID NO: 18319 - protein, 13 aa, Severe acute respiratory syndrome-related coronavirus
  REGION 1..13: note = Table B: HLA-DQA1*01:02-B1*06:02L HLA-DRB1*01:02L
  source 1..13: note = Severe acute respiratory syndrome coronavirus 2
SAGFPFNKWGKAR

SEQ ID NO: 18320 - protein, 13 aa, Severe acute respiratory syndrome-related coronavirus
  REGION 1..13: note = Table B: HLA-DQA1*01:02-B1*06:02L
  source 1..13: note = Severe acute respiratory syndrome coronavirus 2
PFNKWGKARLYYD

SEQ ID NO: 18321 - protein, 12 aa, Severe acute respiratory syndrome-related coronavirus
  REGION 1..12: note = Table B: HLA-DQA1*01:02-B1*06:02L HLA-DQA1*01:03-B1*06:01L
  source 1..12: note = Severe acute respiratory syndrome coronavirus 2
NKWGKARLYYDS

SEQ ID NO: 18322 - protein, 14 aa, Severe acute respiratory syndrome-related coronavirus
  REGION 1..14: note = Table B: HLA-DQA1*01:02-B1*06:02L
  source 1..14: note = Severe acute respiratory syndrome coronavirus 2
WGKARLYYDSMSYE

SEQ ID NO: 18323 - protein, 14 aa, Severe acute respiratory syndrome-related coronavirus
  REGION 1..14: note = Table B: HLA-DQA1*01:02-B1*06:02L HLA-DPA1*03:01-B1*04:02L HLA-DRB1*08:01L HLA-DPA1*02:01-B1*13:01L HLA-DRB1*16:01L HLA-DRB1*04:08L HLA-DRB1*15:03L
  source 1..14: note = Severe acute respiratory syndrome coronavirus 2
RLYYDSMSYEDQDA

SEQ ID NO: 18324 - protein, 12 aa, Severe acute respiratory syndrome-related coronavirus
  REGION 1..12: note = Table B: HLA-DQA1*01:02-B1*06:02L HLA-DQA1*01:03-B1*06:01L HLA-DQA1*02:01-B1*03:03L
  source 1..12: note = Severe acute respiratory syndrome coronavirus 2
DQDALFAYTKRN

SEQ ID NO: 18325 - protein, 11 aa, Severe acute respiratory syndrome-related coronavirus
  REGION 1..11: note = Table B: HLA-DQA1*01:02-B1*06:02L HLA-DPA1*03:01-B1*04:02L HLA-DRB1*14:01L HLA-DRB1*14:02L HLA-DQA1*05:05-B1*03:19L HLA-DQA1*05:01-B1*02:01L HLA-DQA1*05:05-B1*03:116L HLA-DRB1*09:01L HLA-DPA1*03:01-B1*105:01L
  REGION 1..11: note = CONT. FROM ABOVE: HLA-DPA1*01:02-B1*04:01L HLA-DRB1*16:01L
  source 1..11: note = Severe acute respiratory syndrome coronavirus 2
NVIPTITQMNL

SEQ ID NO: 18326 - protein, 11 aa, Severe acute respiratory syndrome-related coronavirus
  REGION 1..11: note = Table B: HLA-DQA1*01:02-B1*06:02L
  source 1..11: note = Severe acute respiratory syndrome coronavirus 2
ITQMNLKYAIS

SEQ ID NO: 18327 - protein, 11 aa, Severe acute respiratory syndrome-related coronavirus
  REGION 1..11: note = Table B: HLA-DQA1*01:02-B1*06:02L
  source 1..11: note = Severe acute respiratory syndrome coronavirus 2
TVAGVSICSTM

SEQ ID NO: 18328 - protein, 12 aa, Severe acute respiratory syndrome-related coronavirus
  REGION 1..12: note = Table B: HLA-DQA1*01:02-B1*06:02L HLA-DQA1*05:05-B1*03:01L HLA-DQA1*01:03-B1*06:01L
  source 1..12: note = Severe acute respiratory syndrome coronavirus 2
VAGVSICSTMTN

SEQ ID NO: 18329 - protein, 11 aa, Severe acute respiratory syndrome-related coronavirus
  REGION 1..11: note = Table B: HLA-DQA1*01:02-B1*06:02L
  source 1..11: note = Severe acute respiratory syndrome coronavirus 2
SICSTMTNRQF

SEQ ID NO: 18330 - protein, 11 aa, Severe acute respiratory syndrome-related coronavirus
  REGION 1..11: note = Table B: HLA-DQA1*01:02-B1*06:02L
  source 1..11: note = Severe acute respiratory syndrome coronavirus 2
ICSTMTNRQFH

SEQ ID NO: 18331 - protein, 13 aa, Severe acute respiratory syndrome-related coronavirus
  REGION 1..13: note = Table B: HLA-DQA1*01:02-B1*06:02L HLA-DRB1*01:02L HLA-DPA1*03:01-B1*04:02L HLA-DRB1*08:01L HLA-DRB1*12:01L HLA-DPA1*03:01-B1*105:01L
  source 1..13: note = Severe acute respiratory syndrome coronavirus 2
NRQFHQKLLKSIA

SEQ ID NO: 18332 - protein, 13 aa, Severe acute respiratory syndrome-related coronavirus
  REGION 1..13: note = Table B: HLA-DQA1*01:02-B1*06:02L
  source 1..13: note = Severe acute respiratory syndrome coronavirus 2
QFHQKLLKSIAAT

SEQ ID NO: 18333 - protein, 13 aa, Severe acute respiratory syndrome-related coronavirus
  REGION 1..13: note = Table B: HLA-DQA1*01:02-B1*06:02L HLA-DQA1*02:01-B1*03:03L HLA-DRB1*15:03L
  source 1..13: note = Severe acute respiratory syndrome coronavirus 2
TSKFYGGWHNMLK

SEQ ID NO: 18334 - protein, 10 aa, Severe acute respiratory syndrome-related coronavirus
  REGION 1..10: note = Table B: HLA-DQA1*01:02-B1*06:02L HLA-DQA1*05:05-B1*03:19L HLA-DQA1*01:03-B1*06:01L HLA-DQA1*02:01-B1*03:03L
  source 1..10: note = Severe acute respiratory syndrome coronavirus 2
GWHNMLKTVY

SEQ ID NO: 18335 - protein, 13 aa, Severe acute respiratory syndrome-related coronavirus
  REGION 1..13: note = Table B: HLA-DQA1*01:02-B1*06:02L HLA-DRB1*08:04L HLA-DPA1*03:01-B1*04:02L HLA-DRB1*12:01L HLA-DPA1*02:01-B1*13:01L HLA-DRB1*16:01L HLA-DQA1*01:03-B1*06:01L HLA-DRB1*15:03L
  source 1..13: note = Severe acute respiratory syndrome coronavirus 2
WHNMLKTVYSDVE

SEQ ID NO: 18336 - protein, 13 aa, Severe acute respiratory syndrome-related coronavirus
  REGION 1..13: note = Table B: HLA-DQA1*01:02-B1*06:02L HLA-DRB1*08:01L
  source 1..13: note = Severe acute respiratory syndrome coronavirus 2
GWDYPKCDRAMPN

SEQ ID NO: 18337 - protein, 14 aa, Severe acute respiratory syndrome-related coronavirus
  REGION 1..14: note = Table B: HLA-DQA1*01:02-B1*06:02L HLA-DRB1*01:02L
  source 1..14: note = Severe acute respiratory syndrome coronavirus 2
DYPKCDRAMPNMLR

SEQ ID NO: 18338 - protein, 11 aa, Severe acute respiratory syndrome-related coronavirus
  REGION 1..11: note = Table B: HLA-DQA1*01:02-B1*06:02L HLA-DQA1*05:01-B1*02:01L HLA-DQA1*03:01-B1*03:02L
  source 1..11: note = Severe acute respiratory syndrome coronavirus 2
MPNMLRIMASL

SEQ ID NO: 18339 - protein, 11 aa, Severe acute respiratory syndrome-related coronavirus
  REGION 1..11: note = Table B: HLA-DQA1*01:02-B1*06:02L
  source 1..11: note = Severe acute respiratory syndrome coronavirus 2
IMASLVLARKH

SEQ ID NO: 18340 - protein, 12 aa, Severe acute respiratory syndrome-related coronavirus
  REGION 1..12: note = Table B: HLA-DQA1*01:02-B1*06:02L
  source 1..12: note = Severe acute respiratory syndrome coronavirus 2
HTTCCSLSHRFY

SEQ ID NO: 18341 - protein, 12 aa, Severe acute respiratory syndrome-related coronavirus
  REGION 1..12: note = Table B: HLA-DQA1*01:02-B1*06:02L HLA-DRB1*01:02L HLA-DPA1*01:03-B1*03:01L HLA-DRB1*12:01L HLA-DPA1*02:01-B1*13:01L HLA-DPA1*03:01-B1*105:01L HLA-DRB1*15:03L
  source 1..12: note = Severe acute respiratory syndrome coronavirus 2
FYRLANECAQVL

SEQ ID NO: 18342 - protein, 12 aa, Severe acute respiratory syndrome-related coronavirus
  REGION 1..12: note = Table B: HLA-DQA1*01:02-B1*06:02L HLA-DRB1*01:02L HLA-DQA1*01:03-B1*06:01L HLA-DQA1*02:01-B1*03:03L HLA-DRB1*15:03L
  source 1..12: note = Severe acute respiratory syndrome coronavirus 2
RLANECAQVLSE

SEQ ID NO: 18343 - protein, 10 aa, Severe acute respiratory syndrome-related coronavirus
  REGION 1..10: note = Table B: HLA-DQA1*01:02-B1*06:02L HLA-DQA1*01:03-B1*06:01L
  source 1..10: note = Severe acute respiratory syndrome coronavirus 2
NECAQVLSEM

SEQ ID NO: 18344 - protein, 12 aa, Severe acute respiratory syndrome-related coronavirus
  REGION 1..12: note = Table B: HLA-DQA1*01:02-B1*06:02L
  source 1..12: note = Severe acute respiratory syndrome coronavirus 2
VLSEMVMCGGSL

SEQ ID NO: 18345 - protein, 14 aa, Severe acute respiratory syndrome-related coronavirus
  REGION 1..14: note = Table B: HLA-DQA1*01:02-B1*06:02L HLA-DRB1*01:02L HLA-DRB1*15:03L
  source 1..14: note = Severe acute respiratory syndrome coronavirus 2
SEMVMCGGSLYVKP

SEQ ID NO: 18346 - protein, 12 aa, Severe acute respiratory syndrome-related coronavirus
  REGION 1..12: note = Table B: HLA-DQA1*01:02-B1*06:02L HLA-DQA1*01:03-B1*06:01L
  source 1..12: note = Severe acute respiratory syndrome coronavirus 2
VMCGGSLYVKPG

SEQ ID NO: 18347 - protein, 14 aa, Severe acute respiratory syndrome-related coronavirus
  REGION 1..14: note = Table B: HLA-DQA1*01:02-B1*06:02L
  source 1..14: note = Severe acute respiratory syndrome coronavirus 2
GSLYVKPGGTSSGD

SEQ ID NO: 18348 - protein, 12 aa, Severe acute respiratory syndrome-related coronavirus
  REGION 1..12: note = Table B: HLA-DQA1*01:02-B1*06:02L HLA-DPA1*03:01-B1*105:01L HLA-DQA1*01:03-B1*06:01L
  source 1..12: note = Severe acute respiratory syndrome coronavirus 2
ANSVFNICQAVT

SEQ ID NO: 18349 - protein, 13 aa, Severe acute respiratory syndrome-related coronavirus
  REGION 1..13: note = Table B: HLA-DQA1*01:02-B1*06:02L
  source 1..13: note = Severe acute respiratory syndrome coronavirus 2
ICQAVTANVNALL

SEQ ID NO: 18350 - protein, 13 aa, Severe acute respiratory syndrome-related coronavirus
  REGION 1..13: note = Table B: HLA-DQA1*01:02-B1*06:02L HLA-DQA1*03:01-B1*03:02L HLA-DQA1*05:05-B1*03:01L HLA-DQA1*01:03-B1*06:01L HLA-DQA1*02:01-B1*03:03L
  source 1..13: note = Severe acute respiratory syndrome coronavirus 2
VTANVNALLSTDG

SEQ ID NO: 18351 - protein, 13 aa, Severe acute respiratory syndrome-related coronavirus
  REGION 1..13: note = Table B: HLA-DQA1*01:02-B1*06:02L HLA-DRB1*11:04L HLA-DPA1*01:02-B1*04:01L
  source 1..13: note = Severe acute respiratory syndrome coronavirus 2
QHRLYECLYRNRD

SEQ ID NO: 18352 - protein, 10 aa, Severe acute respiratory syndrome-related coronavirus
  REGION 1..10: note = Table B: HLA-DQA1*01:02-B1*06:02L HLA-DRB1*08:77L HLA-DPA1*01:03-B1*03:01L HLA-DRB1*03:01L HLA-DRB1*11:02L HLA-DQA1*01-B1*05L HLA-DQA1*05:05-B1*03:19M HLA-DQA1*05:01-B1*02:01M HLA-DRB4*01:01L
  REGION 1..10: note = CONT. FROM ABOVE: HLA-DPA1*01:03-B1*04:01L HLA-DPA1*01:03-B1*104 :01M HLA-DRB1*10:01L HLA-DRB1*16:01L
  source 1..10: note = Severe acute respiratory syndrome coronavirus 2
TDFVNEFYAY

SEQ ID NO: 18353 - protein, 12 aa, Severe acute respiratory syndrome-related coronavirus
  REGION 1..12: note = Table B: HLA-DQA1*01:02-B1*06:02L
  source 1..12: note = Severe acute respiratory syndrome coronavirus 2
RKHFSMMILSDD

SEQ ID NO: 18354 - protein, 12 aa, Severe acute respiratory syndrome-related coronavirus
  REGION 1..12: note = Table B: HLA-DQA1*01:02-B1*06:02L HLA-DQA1*03:01-B1*03:02L
  source 1..12: note = Severe acute respiratory syndrome coronavirus 2
KHFSMMILSDDA

SEQ ID NO: 18355 - protein, 10 aa, Severe acute respiratory syndrome-related coronavirus
  REGION 1..10: note = Table B: HLA-DQA1*01:02-B1*06:02L
  source 1..10: note = Severe acute respiratory syndrome coronavirus 2
ILSDDAVVCF

SEQ ID NO: 18356 - protein, 10 aa, Severe acute respiratory syndrome-related coronavirus
  REGION 1..10: note = Table B: HLA-DQA1*01:02-B1*06:02L
  source 1..10: note = Severe acute respiratory syndrome coronavirus 2
DAVVCFNSTY

SEQ ID NO: 18357 - protein, 14 aa, Severe acute respiratory syndrome-related coronavirus
  REGION 1..14: note = Table B: HLA-DQA1*01:02-B1*06:02L HLA-DPA1*03:01-B1*105:01L
  source 1..14: note = Severe acute respiratory syndrome coronavirus 2
VVCFNSTYASQGLV

SEQ ID NO: 18358 - protein, 11 aa, Severe acute respiratory syndrome-related coronavirus
  REGION 1..11: note = Table B: HLA-DQA1*01:02-B1*06:02L
  source 1..11: note = Severe acute respiratory syndrome coronavirus 2
SQGLVASIKNF

SEQ ID NO: 18359 - protein, 12 aa, Severe acute respiratory syndrome-related coronavirus
  REGION 1..12: note = Table B: HLA-DQA1*01:02-B1*06:02L
  source 1..12: note = Severe acute respiratory syndrome coronavirus 2
LVASIKNFKSVL

SEQ ID NO: 18360 - protein, 11 aa, Severe acute respiratory syndrome-related coronavirus
  REGION 1..11: note = Table B: HLA-DQA1*01:02-B1*06:02L HLA-DPA1*03:01-B1*04:02L HLA-DPA1*03:01-B1*105:01L HLA-DQA1*01:03-B1*06:01L HLA-DQA1*02:01-B1*03:03L
  source 1..11: note = Severe acute respiratory syndrome coronavirus 2
NFKSVLYYQNN

SEQ ID NO: 18361 - protein, 13 aa, Severe acute respiratory syndrome-related coronavirus
  REGION 1..13: note = Table B: HLA-DQA1*01:02-B1*06:02L HLA-DPA1*03:01-B1*04:02L HLA-DPA1*03:01-B1*105:01L
  source 1..13: note = Severe acute respiratory syndrome coronavirus 2
NNVFMSEAKCWTE

SEQ ID NO: 18362 - protein, 12 aa, Severe acute respiratory syndrome-related coronavirus
  REGION 1..12: note = Table B: HLA-DQA1*01:02-B1*06:02L HLA-DPA1*03:01-B1*105:01L HLA-DQA1*01:03-B1*06:01L
  source 1..12: note = Severe acute respiratory syndrome coronavirus 2
VFMSEAKCWTET

SEQ ID NO: 18363 - protein, 12 aa, Severe acute respiratory syndrome-related coronavirus
  REGION 1..12: note = Table B: HLA-DQA1*01:02-B1*06:02L HLA-DPA1*03:01-B1*105:01L HLA-DQA1*01:03-B1*06:01L
  source 1..12: note = Severe acute respiratory syndrome coronavirus 2
FMSEAKCWTETD

SEQ ID NO: 18364 - protein, 12 aa, Severe acute respiratory syndrome-related coronavirus
  REGION 1..12: note = Table B: HLA-DQA1*01:02-B1*06:02L HLA-DQA1*01:03-B1*06:01L
  source 1..12: note = Severe acute respiratory syndrome coronavirus 2
MSEAKCWTETDL

SEQ ID NO: 18365 - protein, 14 aa, Severe acute respiratory syndrome-related coronavirus
  REGION 1..14: note = Table B: HLA-DQA1*01:02-B1*06:02L
  source 1..14: note = Severe acute respiratory syndrome coronavirus 2
DLTKGPHEFCSQHT

SEQ ID NO: 18366 - protein, 12 aa, Severe acute respiratory syndrome-related coronavirus
  REGION 1..12: note = Table B: HLA-DQA1*01:02-B1*06:02L
  source 1..12: note = Severe acute respiratory syndrome coronavirus 2
GPHEFCSQHTML

SEQ ID NO: 18367 - protein, 10 aa, Severe acute respiratory syndrome-related coronavirus
  REGION 1..10: note = Table B: HLA-DQA1*01:02-B1*06:02L HLA-DQA1*03:01-B1*03:02L HLA-DQA1*01:03-B1*06:01L HLA-DQA1*02:01-B1*03:03L
  source 1..10: note = Severe acute respiratory syndrome coronavirus 2
HTMLVKQGDD

SEQ ID NO: 18368 - protein, 13 aa, Severe acute respiratory syndrome-related coronavirus
  REGION 1..13: note = Table B: HLA-DQA1*01:02-B1*06:02L
  source 1..13: note = Severe acute respiratory syndrome coronavirus 2
QGDDYVYLPYPDP

SEQ ID NO: 18369 - protein, 12 aa, Severe acute respiratory syndrome-related coronavirus
  REGION 1..12: note = Table B: HLA-DQA1*01:02-B1*06:02L
  source 1..12: note = Severe acute respiratory syndrome coronavirus 2
PYPDPSRILGAG

SEQ ID NO: 18370 - protein, 14 aa, Severe acute respiratory syndrome-related coronavirus
  REGION 1..14: note = Table B: HLA-DQA1*01:02-B1*06:02L HLA-DQA1*05:05-B1*03:19L HLA-DQA1*05:05-B1*03:01L
  source 1..14: note = Severe acute respiratory syndrome coronavirus 2
DPSRILGAGCFVDD

SEQ ID NO: 18371 - protein, 11 aa, Severe acute respiratory syndrome-related coronavirus
  REGION 1..11: note = Table B: HLA-DQA1*01:02-B1*06:02L
  source 1..11: note = Severe acute respiratory syndrome coronavirus 2
GAGCFVDDIVK

SEQ ID NO: 18372 - protein, 14 aa, Severe acute respiratory syndrome-related coronavirus
  REGION 1..14: note = Table B: HLA-DQA1*01:02-B1*06:02L
  source 1..14: note = Severe acute respiratory syndrome coronavirus 2
AGCFVDDIVKTDGT

SEQ ID NO: 18373 - protein, 12 aa, Severe acute respiratory syndrome-related coronavirus
  REGION 1..12: note = Table B: HLA-DQA1*01:02-B1*06:02L HLA-DQA1*01:01-B1*05:01L HLA-DPA1*03:01-B1*105:01L HLA-DRB1*16:01L HLA-DQA1*01:03-B1*06:01L
  source 1..12: note = Severe acute respiratory syndrome coronavirus 2
FVDDIVKTDGTL

SEQ ID NO: 18374 - protein, 12 aa, Severe acute respiratory syndrome-related coronavirus
  REGION 1..12: note = Table B: HLA-DQA1*01:02-B1*06:02L HLA-DRB1*03:01L HLA-DRB1*08:01L HLA-DRB1*11:01L HLA-DRB4*02:01NL HLA-DRB4*01:01L HLA-DPA1*01:03-B1*04:02L HLA-DPA1*02:01-B1*13:01L HLA-DRB1*10:01L HLA-DRB1*08:03L
  source 1..12: note = Severe acute respiratory syndrome coronavirus 2
VDDIVKTDGTLM

SEQ ID NO: 18375 - protein, 12 aa, Severe acute respiratory syndrome-related coronavirus
  REGION 1..12: note = Table B: HLA-DQA1*01:02-B1*06:02L HLA-DRB1*01:01L HLA-DRB1*08:04L HLA-DRB1*03:01L HLA-DRB1*11:01L HLA-DRB1*13:01L HLA-DRB4*01:01L HLA-DRB1*04:10L HLA-DRB3*01:01L HLA-DPA1*02:01-B1*13:01L HLA-DRB1*10:01L HLA-DRB1*04:08L
  REGION 1..12: note = CONT. FROM ABOVE: HLA-DRB1*08:03L
  source 1..12: note = Severe acute respiratory syndrome coronavirus 2
DIVKTDGTLMIE

SEQ ID NO: 18376 - protein, 12 aa, Severe acute respiratory syndrome-related coronavirus
  REGION 1..12: note = Table B: HLA-DQA1*01:02-B1*06:02L HLA-DRB1*01:02L
  source 1..12: note = Severe acute respiratory syndrome coronavirus 2
LMIERFVSLAID

SEQ ID NO: 18377 - protein, 10 aa, Severe acute respiratory syndrome-related coronavirus
  REGION 1..10: note = Table B: HLA-DQA1*01:02-B1*06:02L HLA-DQA1*05:05-B1*03:19L HLA-DPA1*01:03-B1*04:01L HLA-DPA1*02:01-B1*13:01L
  source 1..10: note = Severe acute respiratory syndrome coronavirus 2
RFVSLAIDAY

SEQ ID NO: 18378 - protein, 12 aa, Severe acute respiratory syndrome-related coronavirus
  REGION 1..12: note = Table B: HLA-DQA1*01:02-B1*06:02L
  source 1..12: note = Severe acute respiratory syndrome coronavirus 2
VSLAIDAYPLTK

SEQ ID NO: 18379 - protein, 12 aa, Severe acute respiratory syndrome-related coronavirus
  REGION 1..12: note = Table B: HLA-DQA1*01:02-B1*06:02L HLA-DPA1*03:01-B1*04:02L HLA-DQA1*01-B1*05L HLA-DQA1*05:01-B1*02:01L HLA-DPA1*01:02-B1*04:01L HLA-DRB1*04:08L
  source 1..12: note = Severe acute respiratory syndrome coronavirus 2
LAIDAYPLTKHP

SEQ ID NO: 18380 - protein, 13 aa, Severe acute respiratory syndrome-related coronavirus
  REGION 1..13: note = Table B: HLA-DQA1*01:02-B1*06:02L HLA-DRB1*08:01L HLA-DRB1*12:01L
  source 1..13: note = Severe acute respiratory syndrome coronavirus 2
VFHLYLQYIRKLH

SEQ ID NO: 18381 - protein, 14 aa, Severe acute respiratory syndrome-related coronavirus
  REGION 1..14: note = Table B: HLA-DQA1*01:02-B1*06:02L
  source 1..14: note = Severe acute respiratory syndrome coronavirus 2
QYIRKLHDELTGHM

SEQ ID NO: 18382 - protein, 10 aa, Severe acute respiratory syndrome-related coronavirus
  REGION 1..10: note = Table B: HLA-DQA1*01:02-B1*06:02L HLA-DPA1*03:01-B1*105:01L HLA-DQA1*01:03-B1*06:01M HLA-DQA1*02:01-B1*03:03L
  source 1..10: note = Severe acute respiratory syndrome coronavirus 2
LTGHMLDMYS

SEQ ID NO: 18383 - protein, 14 aa, Severe acute respiratory syndrome-related coronavirus
  REGION 1..14: note = Table B: HLA-DQA1*01:02-B1*06:02L HLA-DPA1*03:01-B1*105:01L HLA-DRB1*04:08L
  source 1..14: note = Severe acute respiratory syndrome coronavirus 2
GHMLDMYSVMLTND

SEQ ID NO: 18384 - protein, 10 aa, Severe acute respiratory syndrome-related coronavirus
  REGION 1..10: note = Table B: HLA-DQA1*01:02-B1*06:02L HLA-DQA1*05:05-B1*03:19L HLA-DQA1*05:01-B1*02:01L HLA-DRB1*16:01L HLA-DQA1*02:01-B1*03:03L
  source 1..10: note = Severe acute respiratory syndrome coronavirus 2
TSRYWEPEFY

SEQ ID NO: 18385 - protein, 12 aa, Severe acute respiratory syndrome-related coronavirus
  REGION 1..12: note = Table B: HLA-DQA1*01:02-B1*06:02L HLA-DRB1*08:01L HLA-DPA1*01:03-B1*04:02L HLA-DRB1*12:01L HLA-DRB1*15:03L
  source 1..12: note = Severe acute respiratory syndrome coronavirus 2
PEFYEAMYTPHT

SEQ ID NO: 18386 - protein, 12 aa, Severe acute respiratory syndrome-related coronavirus
  REGION 1..12: note = Table B: HLA-DQA1*01:02-B1*06:02L
  source 1..12: note = Severe acute respiratory syndrome coronavirus 2
QAVGACVLCNSQ

SEQ ID NO: 18387 - protein, 11 aa, Severe acute respiratory syndrome-related coronavirus
  REGION 1..11: note = Table B: HLA-DQA1*01:02-B1*06:02L
  source 1..11: note = Severe acute respiratory syndrome coronavirus 2
VGACVLCNSQT

SEQ ID NO: 18388 - protein, 13 aa, Severe acute respiratory syndrome-related coronavirus
  REGION 1..13: note = Table B: HLA-DQA1*01:02-B1*06:02L
  source 1..13: note = Severe acute respiratory syndrome coronavirus 2
NSQTSLRCGACIR

SEQ ID NO: 18389 - protein, 15 aa, Severe acute respiratory syndrome-related coronavirus
  REGION 1..15: note = Table B: HLA-DQA1*01:02-B1*06:02L
  source 1..15: note = Severe acute respiratory syndrome coronavirus 2
SQTSLRCGACIRRPF

SEQ ID NO: 18390 - protein, 17 aa, Severe acute respiratory syndrome-related coronavirus
  REGION 1..17: note = Table B: HLA-DQA1*01:02-B1*06:02L HLA-DPA1*02:01-B1*13:01L
  source 1..17: note = Severe acute respiratory syndrome coronavirus 2
IRRPFLCCKCCYDHVIS

SEQ ID NO: 18391 - protein, 13 aa, Severe acute respiratory syndrome-related coronavirus
  REGION 1..13: note = Table B: HLA-DQA1*01:02-B1*06:02L
  source 1..13: note = Severe acute respiratory syndrome coronavirus 2
VISTSHKLVLSVN

SEQ ID NO: 18392 - protein, 11 aa, Severe acute respiratory syndrome-related coronavirus
  REGION 1..11: note = Table B: HLA-DQA1*01:02-B1*06:02L HLA-DQA1*05:05-B1*03:19L HLA-DQA1*03:01-B1*03:02L HLA-DRB1*16:01L
  source 1..11: note = Severe acute respiratory syndrome coronavirus 2
SHKLVLSVNPY

SEQ ID NO: 18393 - protein, 13 aa, Severe acute respiratory syndrome-related coronavirus
  REGION 1..13: note = Table B: HLA-DQA1*01:02-B1*06:02L
  source 1..13: note = Severe acute respiratory syndrome coronavirus 2
SVNPYVCNAPGCD

SEQ ID NO: 18394 - protein, 13 aa, Severe acute respiratory syndrome-related coronavirus
  REGION 1..13: note = Table B: HLA-DQA1*01:02-B1*06:02L
  source 1..13: note = Severe acute respiratory syndrome coronavirus 2
NPYVCNAPGCDVT

SEQ ID NO: 18395 - protein, 10 aa, Severe acute respiratory syndrome-related coronavirus
  REGION 1..10: note = Table B: HLA-DQA1*01:02-B1*06:02L HLA-DPA1*01:03-B1*03:01L HLA-DRB1*03:01L HLA-DRB1*11:02L HLA-DQA1*05:05-B1*03:19M HLA-DQA1*05:01-B1*02:01L HLA-DPA1*01:03-B1*104:01L HLA-DRB1*16:01L
  source 1..10: note = Severe acute respiratory syndrome coronavirus 2
CDVTDVTQLY

SEQ ID NO: 18396 - protein, 12 aa, Severe acute respiratory syndrome-related coronavirus
  REGION 1..12: note = Table B: HLA-DQA1*01:02-B1*06:02L HLA-DQA1*01:03-B1*06:01L
  source 1..12: note = Severe acute respiratory syndrome coronavirus 2
YLGGMSYYCKSH

SEQ ID NO: 18397 - protein, 14 aa, Severe acute respiratory syndrome-related coronavirus
  REGION 1..14: note = Table B: HLA-DQA1*01:02-B1*06:02L
  source 1..14: note = Severe acute respiratory syndrome coronavirus 2
KPPISFPLCANGQV

SEQ ID NO: 18398 - protein, 15 aa, Severe acute respiratory syndrome-related coronavirus
  REGION 1..15: note = Table B: HLA-DQA1*01:02-B1*06:02L
  source 1..15: note = Severe acute respiratory syndrome coronavirus 2
PPISFPLCANGQVFG

SEQ ID NO: 18399 - protein, 14 aa, Severe acute respiratory syndrome-related coronavirus
  REGION 1..14: note = Table B: HLA-DQA1*01:02-B1*06:02L HLA-DPA1*03:01-B1*105:01L
  source 1..14: note = Severe acute respiratory syndrome coronavirus 2
FPLCANGQVFGLYK

SEQ ID NO: 18400 - protein, 12 aa, Severe acute respiratory syndrome-related coronavirus
  REGION 1..12: note = Table B: HLA-DQA1*01:02-B1*06:02L HLA-DPA1*03:01-B1*105:01L HLA-DPA1*01:02-B1*04:01L
  source 1..12: note = Severe acute respiratory syndrome coronavirus 2
ANGQVFGLYKNT

SEQ ID NO: 18401 - protein, 13 aa, Severe acute respiratory syndrome-related coronavirus
  REGION 1..13: note = Table B: HLA-DQA1*01:02-B1*06:02L HLA-DRB1*01:02L HLA-DQA1*01-B1*05L HLA-DRB1*12:01L HLA-DRB1*16:01L
  source 1..13: note = Severe acute respiratory syndrome coronavirus 2
VFGLYKNTCVGSD

SEQ ID NO: 18402 - protein, 14 aa, Severe acute respiratory syndrome-related coronavirus
  REGION 1..14: note = Table B: HLA-DQA1*01:02-B1*06:02L
  source 1..14: note = Severe acute respiratory syndrome coronavirus 2
LYKNTCVGSDNVTD

SEQ ID NO: 18403 - protein, 15 aa, Severe acute respiratory syndrome-related coronavirus
  REGION 1..15: note = Table B: HLA-DQA1*01:02-B1*06:02L
  source 1..15: note = Severe acute respiratory syndrome coronavirus 2
YKNTCVGSDNVTDFN

SEQ ID NO: 18404 - protein, 14 aa, Severe acute respiratory syndrome-related coronavirus
  REGION 1..14: note = Table B: HLA-DQA1*01:02-B1*06:02L HLA-DPA1*03:01-B1*105:01L HLA-DQA1*05:05-B1*03:01L HLA-DQA1*01:03-B1*06:01L HLA-DRB1*15:03L
  source 1..14: note = Severe acute respiratory syndrome coronavirus 2
SDNVTDFNAIATCD

SEQ ID NO: 18405 - protein, 13 aa, Severe acute respiratory syndrome-related coronavirus
  REGION 1..13: note = Table B: HLA-DQA1*01:02-B1*06:02L HLA-DPA1*03:01-B1*105:01L
  source 1..13: note = Severe acute respiratory syndrome coronavirus 2
VTDFNAIATCDWT

SEQ ID NO: 18406 - protein, 12 aa, Severe acute respiratory syndrome-related coronavirus
  REGION 1..12: note = Table B: HLA-DQA1*01:02-B1*06:02L
  source 1..12: note = Severe acute respiratory syndrome coronavirus 2
DFNAIATCDWTN

SEQ ID NO: 18407 - protein, 12 aa, Severe acute respiratory syndrome-related coronavirus
  REGION 1..12: note = Table B: HLA-DQA1*01:02-B1*06:02L HLA-DPA1*03:01-B1*105:01L HLA-DQA1*01:03-B1*06:01L
  source 1..12: note = Severe acute respiratory syndrome coronavirus 2
NAIATCDWTNAG

SEQ ID NO: 18408 - protein, 12 aa, Severe acute respiratory syndrome-related coronavirus
  REGION 1..12: note = Table B: HLA-DQA1*01:02-B1*06:02L HLA-DPA1*03:01-B1*105:01L HLA-DQA1*05:05-B1*03:01L HLA-DQA1*01:03-B1*06:01L HLA-DQA1*02:01-B1*03:03L
  source 1..12: note = Severe acute respiratory syndrome coronavirus 2
IATCDWTNAGDY

SEQ ID NO: 18409 - protein, 13 aa, Severe acute respiratory syndrome-related coronavirus
  REGION 1..13: note = Table B: HLA-DQA1*01:02-B1*06:02L
  source 1..13: note = Severe acute respiratory syndrome coronavirus 2
NAGDYILANTCTE

SEQ ID NO: 18410 - protein, 11 aa, Severe acute respiratory syndrome-related coronavirus
  REGION 1..11: note = Table B: HLA-DQA1*01:02-B1*06:02L HLA-DRB1*01:02L HLA-DQA1*01:03-B1*06:01L HLA-DQA1*02:01-B1*03:03L
  source 1..11: note = Severe acute respiratory syndrome coronavirus 2
ILANTCTERLK

SEQ ID NO: 18411 - protein, 11 aa, Severe acute respiratory syndrome-related coronavirus
  REGION 1..11: note = Table B: HLA-DQA1*01:02-B1*06:02L HLA-DQA1*01-B1*05L HLA-DPA1*01:03-B1*04:01L HLA-DQA1*02:01-B1*03:03L
  source 1..11: note = Severe acute respiratory syndrome coronavirus 2
VLSDRELHLSW

SEQ ID NO: 18412 - protein, 11 aa, Severe acute respiratory syndrome-related coronavirus
  REGION 1..11: note = Table B: HLA-DQA1*01:02-B1*06:02L HLA-DQA1*05:05-B1*03:01L
  source 1..11: note = Severe acute respiratory syndrome coronavirus 2
WEVGKPRPPLN

SEQ ID NO: 18413 - protein, 10 aa, Severe acute respiratory syndrome-related coronavirus
  REGION 1..10: note = Table B: HLA-DQA1*01:02-B1*06:02L
  source 1..10: note = Severe acute respiratory syndrome coronavirus 2
RPPLNRNYVF

SEQ ID NO: 18414 - protein, 12 aa, Severe acute respiratory syndrome-related coronavirus
  REGION 1..12: note = Table B: HLA-DQA1*01:02-B1*06:02L HLA-DRB1*08:04L HLA-DRB1*11:01L HLA-DRB1*14:54L
  source 1..12: note = Severe acute respiratory syndrome coronavirus 2
YRVTKNSKVQIG

SEQ ID NO: 18415 - protein, 13 aa, Severe acute respiratory syndrome-related coronavirus
  REGION 1..13: note = Table B: HLA-DQA1*01:02-B1*06:02L
  source 1..13: note = Severe acute respiratory syndrome coronavirus 2
KLNVGDYFVLTSH

SEQ ID NO: 18416 - protein, 13 aa, Severe acute respiratory syndrome-related coronavirus
  REGION 1..13: note = Table B: HLA-DQA1*01:02-B1*06:02L
  source 1..13: note = Severe acute respiratory syndrome coronavirus 2
LNVGDYFVLTSHT

SEQ ID NO: 18417 - protein, 12 aa, Severe acute respiratory syndrome-related coronavirus
  REGION 1..12: note = Table B: HLA-DQA1*01:02-B1*06:02L
  source 1..12: note = Severe acute respiratory syndrome coronavirus 2
LTSHTVMPLSAP

SEQ ID NO: 18418 - protein, 10 aa, Severe acute respiratory syndrome-related coronavirus
  REGION 1..10: note = Table B: HLA-DQA1*01:02-B1*06:02L
  source 1..10: note = Severe acute respiratory syndrome coronavirus 2
EHYVRITGLY

SEQ ID NO: 18419 - protein, 12 aa, Severe acute respiratory syndrome-related coronavirus
  REGION 1..12: note = Table B: HLA-DQA1*01:02-B1*06:02L HLA-DQA1*05:05-B1*03:01L HLA-DQA1*01:03-B1*06:01L
  source 1..12: note = Severe acute respiratory syndrome coronavirus 2
TGLYPTLNISDE

SEQ ID NO: 18420 - protein, 15 aa, Severe acute respiratory syndrome-related coronavirus
  REGION 1..15: note = Table B: HLA-DQA1*01:02-B1*06:02L HLA-DPA1*03:01-B1*105:01L
  source 1..15: note = Severe acute respiratory syndrome coronavirus 2
PTLNISDEFSSNVAN

SEQ ID NO: 18421 - protein, 13 aa, Severe acute respiratory syndrome-related coronavirus
  REGION 1..13: note = Table B: HLA-DQA1*01:02-B1*06:02L
  source 1..13: note = Severe acute respiratory syndrome coronavirus 2
YQKVGMQKYSTLQ

SEQ ID NO: 18422 - protein, 14 aa, Severe acute respiratory syndrome-related coronavirus
  REGION 1..14: note = Table B: HLA-DQA1*01:02-B1*06:02L
  source 1..14: note = Severe acute respiratory syndrome coronavirus 2
YSTLQGPPGTGKSH

SEQ ID NO: 18423 - protein, 10 aa, Severe acute respiratory syndrome-related coronavirus
  REGION 1..10: note = Table B: HLA-DQA1*01:02-B1*06:02L HLA-DQA1*05:05-B1*03:19L HLA-DRB4*01:01L HLA-DPA1*01:03-B1*04:01L HLA-DPA1*02:01-B1*13:01L
  source 1..10: note = Severe acute respiratory syndrome coronavirus 2
HFAIGLALYY

SEQ ID NO: 18424 - protein, 11 aa, Severe acute respiratory syndrome-related coronavirus
  REGION 1..11: note = Table B: HLA-DQA1*01:02-B1*06:02L
  source 1..11: note = Severe acute respiratory syndrome coronavirus 2
IVYTACSHAAV

SEQ ID NO: 18425 - protein, 10 aa, Severe acute respiratory syndrome-related coronavirus
  REGION 1..10: note = Table B: HLA-DQA1*01:02-B1*06:02L HLA-DQA1*01:03-B1*06:01L
  source 1..10: note = Severe acute respiratory syndrome coronavirus 2
YTACSHAAVD

SEQ ID NO: 18426 - protein, 14 aa, Severe acute respiratory syndrome-related coronavirus
  REGION 1..14: note = Table B: HLA-DQA1*01:02-B1*06:02L
  source 1..14: note = Severe acute respiratory syndrome coronavirus 2
TACSHAAVDALCEK

SEQ ID NO: 18427 - protein, 12 aa, Severe acute respiratory syndrome-related coronavirus
  REGION 1..12: note = Table B: HLA-DQA1*01:02-B1*06:02L
  source 1..12: note = Severe acute respiratory syndrome coronavirus 2
SHAAVDALCEKA

SEQ ID NO: 18428 - protein, 12 aa, Severe acute respiratory syndrome-related coronavirus
  REGION 1..12: note = Table B: HLA-DQA1*01:02-B1*06:02L
  source 1..12: note = Severe acute respiratory syndrome coronavirus 2
HAAVDALCEKAL

SEQ ID NO: 18429 - protein, 12 aa, Severe acute respiratory syndrome-related coronavirus
  REGION 1..12: note = Table B: HLA-DQA1*01:02-B1*06:02L HLA-DRB1*01:02L HLA-DQA1*01:03-B1*06:01L
  source 1..12: note = Severe acute respiratory syndrome coronavirus 2
AAVDALCEKALK

SEQ ID NO: 18430 - protein, 10 aa, Severe acute respiratory syndrome-related coronavirus
  REGION 1..10: note = Table B: HLA-DQA1*01:02-B1*06:02L HLA-DQA1*05:05-B1*03:19L
  source 1..10: note = Severe acute respiratory syndrome coronavirus 2
DALCEKALKY

SEQ ID NO: 18431 - protein, 11 aa, Severe acute respiratory syndrome-related coronavirus
  REGION 1..11: note = Table B: HLA-DQA1*01:02-B1*06:02L HLA-DQA1*01-B1*05L
  source 1..11: note = Severe acute respiratory syndrome coronavirus 2
EKALKYLPIDK

SEQ ID NO: 18432 - protein, 13 aa, Severe acute respiratory syndrome-related coronavirus
  REGION 1..13: note = Table B: HLA-DQA1*01:02-B1*06:02L HLA-DRB1*08:01L
  source 1..13: note = Severe acute respiratory syndrome coronavirus 2
YLPIDKCSRIIPA

SEQ ID NO: 18433 - protein, 10 aa, Severe acute respiratory syndrome-related coronavirus
  REGION 1..10: note = Table B: HLA-DQA1*01:02-B1*06:02L HLA-DQA1*01:03-B1*06:01L HLA-DQA1*02:01-B1*03:03L
  source 1..10: note = Severe acute respiratory syndrome coronavirus 2
DKCSRIIPAR

SEQ ID NO: 18434 - protein, 12 aa, Severe acute respiratory syndrome-related coronavirus
  REGION 1..12: note = Table B: HLA-DQA1*01:02-B1*06:02L
  source 1..12: note = Severe acute respiratory syndrome coronavirus 2
IIPARARVECFD

SEQ ID NO: 18435 - protein, 14 aa, Severe acute respiratory syndrome-related coronavirus
  REGION 1..14: note = Table B: HLA-DQA1*01:02-B1*06:02L
  source 1..14: note = Severe acute respiratory syndrome coronavirus 2
VECFDKFKVNSTLE

SEQ ID NO: 18436 - protein, 12 aa, Severe acute respiratory syndrome-related coronavirus
  REGION 1..12: note = Table B: HLA-DQA1*01:02-B1*06:02L
  source 1..12: note = Severe acute respiratory syndrome coronavirus 2
VFCTVNALPETT

SEQ ID NO: 18437 - protein, 12 aa, Severe acute respiratory syndrome-related coronavirus
  REGION 1..12: note = Table B: HLA-DQA1*01:02-B1*06:02L HLA-DQA1*03:01-B1*03:02L HLA-DQA1*02:01-B1*03:03L
  source 1..12: note = Severe acute respiratory syndrome coronavirus 2
PETTADIVVFDE

SEQ ID NO: 18438 - protein, 12 aa, Severe acute respiratory syndrome-related coronavirus
  REGION 1..12: note = Table B: HLA-DQA1*01:02-B1*06:02L HLA-DPA1*03:01-B1*105:01L
  source 1..12: note = Severe acute respiratory syndrome coronavirus 2
TNYDLSVVNARL

SEQ ID NO: 18439 - protein, 11 aa, Severe acute respiratory syndrome-related coronavirus
  REGION 1..11: note = Table B: HLA-DQA1*01:02-B1*06:02L
  source 1..11: note = Severe acute respiratory syndrome coronavirus 2
YDLSVVNARLR

SEQ ID NO: 18440 - protein, 11 aa, Severe acute respiratory syndrome-related coronavirus
  REGION 1..11: note = Table B: HLA-DQA1*01:02-B1*06:02L HLA-DRB1*03:01L HLA-DRB1*14:01L HLA-DQA1*02:01-B1*03:03L HLA-DRB1*15:03L
  source 1..11: note = Severe acute respiratory syndrome coronavirus 2
VVNARLRAKHY

SEQ ID NO: 18441 - protein, 15 aa, Severe acute respiratory syndrome-related coronavirus
  REGION 1..15: note = Table B: HLA-DQA1*01:02-B1*06:02L HLA-DRB1*11:04L HLA-DRB1*11:01L HLA-DRB3*01:01L HLA-DRB1*15:03L
  source 1..15: note = Severe acute respiratory syndrome coronavirus 2
ARLRAKHYVYIGDPA

SEQ ID NO: 18442 - protein, 15 aa, Severe acute respiratory syndrome-related coronavirus
  REGION 1..15: note = Table B: HLA-DQA1*01:02-B1*06:02L
  source 1..15: note = Severe acute respiratory syndrome coronavirus 2
LPAPRTLLTKGTLEP

SEQ ID NO: 18443 - protein, 13 aa, Severe acute respiratory syndrome-related coronavirus
  REGION 1..13: note = Table B: HLA-DQA1*01:02-B1*06:02L HLA-DPA1*01:03-B1*03:01L HLA-DPA1*02:01-B1*13:01L HLA-DQA1*01:03-B1*06:01L
  source 1..13: note = Severe acute respiratory syndrome coronavirus 2
LEPEYFNSVCRLM

SEQ ID NO: 18444 - protein, 12 aa, Severe acute respiratory syndrome-related coronavirus
  REGION 1..12: note = Table B: HLA-DQA1*01:02-B1*06:02L
  source 1..12: note = Severe acute respiratory syndrome coronavirus 2
FNSVCRLMKTIG

SEQ ID NO: 18445 - protein, 12 aa, Severe acute respiratory syndrome-related coronavirus
  REGION 1..12: note = Table B: HLA-DQA1*01:02-B1*06:02L HLA-DQA1*01:03-B1*06:01L
  source 1..12: note = Severe acute respiratory syndrome coronavirus 2
NSVCRLMKTIGP

SEQ ID NO: 18446 - protein, 12 aa, Severe acute respiratory syndrome-related coronavirus
  REGION 1..12: note = Table B: HLA-DQA1*01:02-B1*06:02L HLA-DQA1*01:03-B1*06:01L
  source 1..12: note = Severe acute respiratory syndrome coronavirus 2
SVCRLMKTIGPD

SEQ ID NO: 18447 - protein, 14 aa, Severe acute respiratory syndrome-related coronavirus
  REGION 1..14: note = Table B: HLA-DQA1*01:02-B1*06:02L
  source 1..14: note = Severe acute respiratory syndrome coronavirus 2
IGPDMFLGTCRRCP

SEQ ID NO: 18448 - protein, 14 aa, Severe acute respiratory syndrome-related coronavirus
  REGION 1..14: note = Table B: HLA-DQA1*01:02-B1*06:02L HLA-DRB1*01:02L HLA-DQA1*01:03-B1*06:01L
  source 1..14: note = Severe acute respiratory syndrome coronavirus 2
GPDMFLGTCRRCPA

SEQ ID NO: 18449 - protein, 12 aa, Severe acute respiratory syndrome-related coronavirus
  REGION 1..12: note = Table B: HLA-DQA1*01:02-B1*06:02L
  source 1..12: note = Severe acute respiratory syndrome coronavirus 2
MFLGTCRRCPAE

SEQ ID NO: 18450 - protein, 13 aa, Severe acute respiratory syndrome-related coronavirus
  REGION 1..13: note = Table B: HLA-DQA1*01:02-B1*06:02L
  source 1..13: note = Severe acute respiratory syndrome coronavirus 2
AHKDKSAQCFKMF

SEQ ID NO: 18451 - protein, 12 aa, Severe acute respiratory syndrome-related coronavirus
  REGION 1..12: note = Table B: HLA-DQA1*01:02-B1*06:02L HLA-DQA1*01:03-B1*06:01L
  source 1..12: note = Severe acute respiratory syndrome coronavirus 2
DKSAQCFKMFYK

SEQ ID NO: 18452 - protein, 14 aa, Severe acute respiratory syndrome-related coronavirus
  REGION 1..14: note = Table B: HLA-DQA1*01:02-B1*06:02L HLA-DRB1*08:01L
  source 1..14: note = Severe acute respiratory syndrome coronavirus 2
SAQCFKMFYKGVIT

SEQ ID NO: 18453 - protein, 13 aa, Severe acute respiratory syndrome-related coronavirus
  REGION 1..13: note = Table B: HLA-DQA1*01:02-B1*06:02L HLA-DRB1*03:01L HLA-DQA1*05:05-B1*03:19L
  source 1..13: note = Severe acute respiratory syndrome coronavirus 2
VITHDVSSAINRP

SEQ ID NO: 18454 - protein, 13 aa, Severe acute respiratory syndrome-related coronavirus
  REGION 1..13: note = Table B: HLA-DQA1*01:02-B1*06:02L
  source 1..13: note = Severe acute respiratory syndrome coronavirus 2
PAWRKAVFISPYN

SEQ ID NO: 18455 - protein, 13 aa, Severe acute respiratory syndrome-related coronavirus
  REGION 1..13: note = Table B: HLA-DQA1*01:02-B1*06:02L HLA-DQA1*01-B1*05L HLA-DPA1*02:01-B1*13:01L HLA-DQA1*02:01-B1*03:03L
  source 1..13: note = Severe acute respiratory syndrome coronavirus 2
WRKAVFISPYNSQ

SEQ ID NO: 18456 - protein, 12 aa, Severe acute respiratory syndrome-related coronavirus
  REGION 1..12: note = Table B: HLA-DQA1*01:02-B1*06:02L
  source 1..12: note = Severe acute respiratory syndrome coronavirus 2
VASKILGLPTQT

SEQ ID NO: 18457 - protein, 14 aa, Severe acute respiratory syndrome-related coronavirus
  REGION 1..14: note = Table B: HLA-DQA1*01:02-B1*06:02L HLA-DQA1*05:05-B1*03:19L HLA-DQA1*01:03-B1*06:01L
  source 1..14: note = Severe acute respiratory syndrome coronavirus 2
GLPTQTVDSSQGSE

SEQ ID NO: 18458 - protein, 12 aa, Severe acute respiratory syndrome-related coronavirus
  REGION 1..12: note = Table B: HLA-DQA1*01:02-B1*06:02L HLA-DQA1*05:05-B1*03:19L HLA-DPA1*03:01-B1*105:01L HLA-DQA1*05:05-B1*03:01L
  source 1..12: note = Severe acute respiratory syndrome coronavirus 2
FTQTTETAHSCN

SEQ ID NO: 18459 - protein, 11 aa, Severe acute respiratory syndrome-related coronavirus
  REGION 1..11: note = Table B: HLA-DQA1*01:02-B1*06:02L
  source 1..11: note = Severe acute respiratory syndrome coronavirus 2
ETAHSCNVNRF

SEQ ID NO: 18460 - protein, 10 aa, Severe acute respiratory syndrome-related coronavirus
  REGION 1..10: note = Table B: HLA-DQA1*01:02-B1*06:02L HLA-DQA1*01:03-B1*06:01L
  source 1..10: note = Severe acute respiratory syndrome coronavirus 2
AHSCNVNRFN

SEQ ID NO: 18461 - protein, 10 aa, Severe acute respiratory syndrome-related coronavirus
  REGION 1..10: note = Table B: HLA-DQA1*01:02-B1*06:02L HLA-DQA1*05:05-B1*03:19L HLA-DRB1*16:01L HLA-DQA1*01:03-B1*06:01L HLA-DQA1*02:01-B1*03:03L
  source 1..10: note = Severe acute respiratory syndrome coronavirus 2
VAITRAKVGI

SEQ ID NO: 18462 - protein, 14 aa, Severe acute respiratory syndrome-related coronavirus
  REGION 1..14: note = Table B: HLA-DQA1*01:02-B1*06:02L HLA-DRB1*01:02L HLA-DPA1*01:03-B1*104:01L
  source 1..14: note = Severe acute respiratory syndrome coronavirus 2
ITRAKVGILCIMSD

SEQ ID NO: 18463 - protein, 12 aa, Severe acute respiratory syndrome-related coronavirus
  REGION 1..12: note = Table B: HLA-DQA1*01:02-B1*06:02L
  source 1..12: note = Severe acute respiratory syndrome coronavirus 2
AKVGILCIMSDR

SEQ ID NO: 18464 - protein, 12 aa, Severe acute respiratory syndrome-related coronavirus
  REGION 1..12: note = Table B: HLA-DQA1*01:02-B1*06:02L HLA-DQA1*05:01-B1*02:01L HLA-DPA1*03:01-B1*105:01L
  source 1..12: note = Severe acute respiratory syndrome coronavirus 2
IMSDRDLYDKLQ

SEQ ID NO: 18465 - protein, 11 aa, Severe acute respiratory syndrome-related coronavirus
  REGION 1..11: note = Table B: HLA-DQA1*01:02-B1*06:02L HLA-DRB1*01:02L HLA-DPA1*03:01-B1*105:01L HLA-DRB1*16:01L
  source 1..11: note = Severe acute respiratory syndrome coronavirus 2
QFTSLEIPRRN

SEQ ID NO: 18466 - protein, 12 aa, Severe acute respiratory syndrome-related coronavirus
  REGION 1..12: note = Table B: HLA-DQA1*01:02-B1*06:02L HLA-DRB1*01:02L
  source 1..12: note = Severe acute respiratory syndrome coronavirus 2
FTSLEIPRRNVA

SEQ ID NO: 18467 - protein, 10 aa, Severe acute respiratory syndrome-related coronavirus
  REGION 1..10: note = Table B: HLA-DQA1*01:02-B1*06:02L HLA-DQA1*05:01-B1*02:01L HLA-DQA1*03:01-B1*03:02L
  source 1..10: note = Severe acute respiratory syndrome coronavirus 2
EIPRRNVATL

SEQ ID NO: 18468 - protein, 10 aa, Severe acute respiratory syndrome-related coronavirus
  REGION 1..10: note = Table B: HLA-DQA1*01:02-B1*06:02L HLA-DQA1*02:01-B1*03:03L
  source 1..10: note = Severe acute respiratory syndrome coronavirus 2
LQAENVTGLF

SEQ ID NO: 18469 - protein, 12 aa, Severe acute respiratory syndrome-related coronavirus
  REGION 1..12: note = Table B: HLA-DQA1*01:02-B1*06:02L HLA-DPA1*03:01-B1*105:01L
  source 1..12: note = Severe acute respiratory syndrome coronavirus 2
AENVTGLFKDCS

SEQ ID NO: 18470 - protein, 12 aa, Severe acute respiratory syndrome-related coronavirus
  REGION 1..12: note = Table B: HLA-DQA1*01:02-B1*06:02L HLA-DPA1*03:01-B1*105:01L HLA-DQA1*02:01-B1*03:03L
  source 1..12: note = Severe acute respiratory syndrome coronavirus 2
ENVTGLFKDCSK

SEQ ID NO: 18471 - protein, 13 aa, Severe acute respiratory syndrome-related coronavirus
  REGION 1..13: note = Table B: HLA-DQA1*01:02-B1*06:02L
  source 1..13: note = Severe acute respiratory syndrome coronavirus 2
FKDCSKVITGLHP

SEQ ID NO: 18472 - protein, 11 aa, Severe acute respiratory syndrome-related coronavirus
  REGION 1..11: note = Table B: HLA-DQA1*01:02-B1*06:02L HLA-DQA1*01:03-B1*06:01L HLA-DQA1*02:01-B1*03:03L
  source 1..11: note = Severe acute respiratory syndrome coronavirus 2
VITGLHPTQAP

SEQ ID NO: 18473 - protein, 12 aa, Severe acute respiratory syndrome-related coronavirus
  REGION 1..12: note = Table B: HLA-DQA1*01:02-B1*06:02L HLA-DQA1*03:01-B1*03:02L HLA-DQA1*01:03-B1*06:01L HLA-DQA1*02:01-B1*03:03L
  source 1..12: note = Severe acute respiratory syndrome coronavirus 2
HPTQAPTHLSVD

SEQ ID NO: 18474 - protein, 12 aa, Severe acute respiratory syndrome-related coronavirus
  REGION 1..12: note = Table B: HLA-DQA1*01:02-B1*06:02L HLA-DQA1*03:01-B1*03:02L HLA-DQA1*01:03-B1*06:01L HLA-DQA1*02:01-B1*03:03L
  source 1..12: note = Severe acute respiratory syndrome coronavirus 2
PTQAPTHLSVDT

SEQ ID NO: 18475 - protein, 11 aa, Severe acute respiratory syndrome-related coronavirus
  REGION 1..11: note = Table B: HLA-DQA1*01:02-B1*06:02L HLA-DQA1*02:01-B1*03:03L
  source 1..11: note = Severe acute respiratory syndrome coronavirus 2
APTHLSVDTKF

SEQ ID NO: 18476 - protein, 12 aa, Severe acute respiratory syndrome-related coronavirus
  REGION 1..12: note = Table B: HLA-DQA1*01:02-B1*06:02L HLA-DRB1*01:02L HLA-DRB1*08:04L HLA-DPA1*01:03-B1*03:01L HLA-DRB1*11:04L HLA-DRB1*12:01L HLA-DRB1*15:03L
  source 1..12: note = Severe acute respiratory syndrome coronavirus 2
HLSVDTKFKTEG

SEQ ID NO: 18477 - protein, 13 aa, Severe acute respiratory syndrome-related coronavirus
  REGION 1..13: note = Table B: HLA-DQA1*01:02-B1*06:02L HLA-DPA1*03:01-B1*04:02L HLA-DPA1*01:03-B1*04:01L HLA-DPA1*01:03-B1*04:02L HLA-DPA1*02:01-B1*13:01L HLA-DPA1*03:01-B1*105:01L HLA-DPA1*01:02-B1*04:01L HLA-DRB1*04:08L
  source 1..13: note = Severe acute respiratory syndrome coronavirus 2
VDTKFKTEGLCVD

SEQ ID NO: 18478 - protein, 13 aa, Severe acute respiratory syndrome-related coronavirus
  REGION 1..13: note = Table B: HLA-DQA1*01:02-B1*06:02L HLA-DPA1*01:03-B1*04:02L HLA-DRB1*16:01L HLA-DRB1*04:08L
  source 1..13: note = Severe acute respiratory syndrome coronavirus 2
KFKTEGLCVDIPG

SEQ ID NO: 18479 - protein, 13 aa, Severe acute respiratory syndrome-related coronavirus
  REGION 1..13: note = Table B: HLA-DQA1*01:02-B1*06:02L
  source 1..13: note = Severe acute respiratory syndrome coronavirus 2
TEGLCVDIPGIPK

SEQ ID NO: 18480 - protein, 12 aa, Severe acute respiratory syndrome-related coronavirus
  REGION 1..12: note = Table B: HLA-DQA1*01:02-B1*06:02L HLA-DRB1*08:01L HLA-DRB1*04:08L
  source 1..12: note = Severe acute respiratory syndrome coronavirus 2
DMTYRRLISMMG

SEQ ID NO: 18481 - protein, 12 aa, Severe acute respiratory syndrome-related coronavirus
  REGION 1..12: note = Table B: HLA-DQA1*01:02-B1*06:02L HLA-DRB1*01:01L HLA-DRB1*08:01L HLA-DRB1*11:01L HLA-DRB1*12:01L HLA-DRB1*15:03L
  source 1..12: note = Severe acute respiratory syndrome coronavirus 2
TYRRLISMMGFK

SEQ ID NO: 18482 - protein, 10 aa, Severe acute respiratory syndrome-related coronavirus
  REGION 1..10: note = Table B: HLA-DQA1*01:02-B1*06:02L HLA-DPA1*01:03-B1*03:01L HLA-DRB1*03:01L HLA-DRB1*11:02L HLA-DQA1*05:05-B1*03:19M HLA-DQA1*05:01-B1*02:01L HLA-DPA1*01:03-B1*104:01L HLA-DRB1*16:01L
  source 1..10: note = Severe acute respiratory syndrome coronavirus 2
ISMMGFKMNY

SEQ ID NO: 18483 - protein, 12 aa, Severe acute respiratory syndrome-related coronavirus
  REGION 1..12: note = Table B: HLA-DQA1*01:02-B1*06:02L
  source 1..12: note = Severe acute respiratory syndrome coronavirus 2
SMMGFKMNYQVN

SEQ ID NO: 18484 - protein, 12 aa, Severe acute respiratory syndrome-related coronavirus
  REGION 1..12: note = Table B: HLA-DQA1*01:02-B1*06:02L
  source 1..12: note = Severe acute respiratory syndrome coronavirus 2
MMGFKMNYQVNG

SEQ ID NO: 18485 - protein, 12 aa, Severe acute respiratory syndrome-related coronavirus
  REGION 1..12: note = Table B: HLA-DQA1*01:02-B1*06:02L HLA-DRB1*01:02L HLA-DRB1*15:01L
  source 1..12: note = Severe acute respiratory syndrome coronavirus 2
QVNGYPNMFITR

SEQ ID NO: 18486 - protein, 12 aa, Severe acute respiratory syndrome-related coronavirus
  REGION 1..12: note = Table B: HLA-DQA1*01:02-B1*06:02L HLA-DRB1*01:02L
  source 1..12: note = Severe acute respiratory syndrome coronavirus 2
VNGYPNMFITRE

SEQ ID NO: 18487 - protein, 12 aa, Severe acute respiratory syndrome-related coronavirus
  REGION 1..12: note = Table B: HLA-DQA1*01:02-B1*06:02L HLA-DQA1*01-B1*05L
  source 1..12: note = Severe acute respiratory syndrome coronavirus 2
NGYPNMFITREE

SEQ ID NO: 18488 - protein, 11 aa, Severe acute respiratory syndrome-related coronavirus
  REGION 1..11: note = Table B: HLA-DQA1*01:02-B1*06:02L
  source 1..11: note = Severe acute respiratory syndrome coronavirus 2
IRHVRAWIGFD

SEQ ID NO: 18489 - protein, 15 aa, Severe acute respiratory syndrome-related coronavirus
  REGION 1..15: note = Table B: HLA-DQA1*01:02-B1*06:02L HLA-DRB1*01:01L
  source 1..15: note = Severe acute respiratory syndrome coronavirus 2
VRAWIGFDVEGCHAT

SEQ ID NO: 18490 - protein, 13 aa, Severe acute respiratory syndrome-related coronavirus
  REGION 1..13: note = Table B: HLA-DQA1*01:02-B1*06:02L
  source 1..13: note = Severe acute respiratory syndrome coronavirus 2
WIGFDVEGCHATR

SEQ ID NO: 18491 - protein, 12 aa, Severe acute respiratory syndrome-related coronavirus
  REGION 1..12: note = Table B: HLA-DQA1*01:02-B1*06:02L
  source 1..12: note = Severe acute respiratory syndrome coronavirus 2
GFDVEGCHATRE

SEQ ID NO: 18492 - protein, 11 aa, Severe acute respiratory syndrome-related coronavirus
  REGION 1..11: note = Table B: HLA-DQA1*01:02-B1*06:02L HLA-DQA1*02:01-B1*03:03L
  source 1..11: note = Severe acute respiratory syndrome coronavirus 2
DVEGCHATREA

SEQ ID NO: 18493 - protein, 12 aa, Severe acute respiratory syndrome-related coronavirus
  REGION 1..12: note = Table B: HLA-DQA1*01:02-B1*06:02L
  source 1..12: note = Severe acute respiratory syndrome coronavirus 2
TNLPLQLGFSTG

SEQ ID NO: 18494 - protein, 14 aa, Severe acute respiratory syndrome-related coronavirus
  REGION 1..14: note = Table B: HLA-DQA1*01:02-B1*06:02L
  source 1..14: note = Severe acute respiratory syndrome coronavirus 2
QLGFSTGVNLVAVP

SEQ ID NO: 18495 - protein, 10 aa, Severe acute respiratory syndrome-related coronavirus
  REGION 1..10: note = Table B: HLA-DQA1*01:02-B1*06:02L HLA-DQA1*05:05-B1*03:19L HLA-DQA1*05:01-B1*02:01L HLA-DQA1*02:01-B1*03:03L
  source 1..10: note = Severe acute respiratory syndrome coronavirus 2
VNLVAVPTGY

SEQ ID NO: 18496 - protein, 15 aa, Severe acute respiratory syndrome-related coronavirus
  REGION 1..15: note = Table B: HLA-DQA1*01:02-B1*06:02L
  source 1..15: note = Severe acute respiratory syndrome coronavirus 2
TPNNTDFSRVSAKPP

SEQ ID NO: 18497 - protein, 13 aa, Severe acute respiratory syndrome-related coronavirus
  REGION 1..13: note = Table B: HLA-DQA1*01:02-B1*06:02L HLA-DRB4*03:01NL HLA-DRB1*14:01L HLA-DRB1*15:03L
  source 1..13: note = Severe acute respiratory syndrome coronavirus 2
TDFSRVSAKPPPG

SEQ ID NO: 18498 - protein, 14 aa, Severe acute respiratory syndrome-related coronavirus
  REGION 1..14: note = Table B: HLA-DQA1*01:02-B1*06:02L HLA-DPA1*01:03-B1*04:02L HLA-DRB1*12:01L HLA-DRB1*16:01L HLA-DRB1*04:08L HLA-DRB1*15:03L
  source 1..14: note = Severe acute respiratory syndrome coronavirus 2
FKHLIPLMYKGLPW

SEQ ID NO: 18499 - protein, 10 aa, Severe acute respiratory syndrome-related coronavirus
  REGION 1..10: note = Table B: HLA-DQA1*01:02-B1*06:02L HLA-DQA1*05:05-B1*03:116L HLA-DPA1*02:01-B1*13:01L HLA-DPA1*03:01-B1*105:01L HLA-DQA1*01:03-B1*06:01L HLA-DRB1*15:03L
  source 1..10: note = Severe acute respiratory syndrome coronavirus 2
LPWNVVRIKI

SEQ ID NO: 18500 - protein, 12 aa, Severe acute respiratory syndrome-related coronavirus
  REGION 1..12: note = Table B: HLA-DQA1*01:02-B1*06:02L HLA-DPA1*03:01-B1*105:01L
  source 1..12: note = Severe acute respiratory syndrome coronavirus 2
MLSDTLKNLSDR

SEQ ID NO: 18501 - protein, 11 aa, Severe acute respiratory syndrome-related coronavirus
  REGION 1..11: note = Table B: HLA-DQA1*01:02-B1*06:02L HLA-DQA1*01:03-B1*06:01L HLA-DRB1*15:03L
  source 1..11: note = Severe acute respiratory syndrome coronavirus 2
TLKNLSDRVVF

SEQ ID NO: 18502 - protein, 10 aa, Severe acute respiratory syndrome-related coronavirus
  REGION 1..10: note = Table B: HLA-DQA1*01:02-B1*06:02L HLA-DPA1*01:03-B1*03:01L HLA-DRB1*11:02L HLA-DQA1*05:05-B1*03:19M HLA-DQA1*05:01-B1*02:01L HLA-DPA1*01:03-B1*104:01L HLA-DRB1*16:01L
  source 1..10: note = Severe acute respiratory syndrome coronavirus 2
LSDRVVFVLW

SEQ ID NO: 18503 - protein, 12 aa, Severe acute respiratory syndrome-related coronavirus
  REGION 1..12: note = Table B: HLA-DQA1*01:02-B1*06:02L HLA-DPA1*03:01-B1*105:01L HLA-DQA1*02:01-B1*03:03L
  source 1..12: note = Severe acute respiratory syndrome coronavirus 2
SDRVVFVLWAHG

SEQ ID NO: 18504 - protein, 10 aa, Severe acute respiratory syndrome-related coronavirus
  REGION 1..10: note = Table B: HLA-DQA1*01:02-B1*06:02L HLA-DPA1*03:01-B1*04:02L HLA-DPA1*02:01-B1*13:01L HLA-DQA1*01:03-B1*06:01L HLA-DRB1*15:03L
  source 1..10: note = Severe acute respiratory syndrome coronavirus 2
VVFVLWAHGF

SEQ ID NO: 18505 - protein, 14 aa, Severe acute respiratory syndrome-related coronavirus
  REGION 1..14: note = Table B: HLA-DQA1*01:02-B1*06:02L
  source 1..14: note = Severe acute respiratory syndrome coronavirus 2
IGPERTCCLCDRRA

SEQ ID NO: 18506 - protein, 14 aa, Severe acute respiratory syndrome-related coronavirus
  REGION 1..14: note = Table B: HLA-DQA1*01:02-B1*06:02L HLA-DRB1*01:02L
  source 1..14: note = Severe acute respiratory syndrome coronavirus 2
GPERTCCLCDRRAT

SEQ ID NO: 18507 - protein, 13 aa, Severe acute respiratory syndrome-related coronavirus
  REGION 1..13: note = Table B: HLA-DQA1*01:02-B1*06:02L HLA-DQA1*03:01-B1*03:02L HLA-DQA1*01:03-B1*06:01L HLA-DQA1*02:01-B1*03:03L
  source 1..13: note = Severe acute respiratory syndrome coronavirus 2
DRRATCFSTASDT

SEQ ID NO: 18508 - protein, 14 aa, Severe acute respiratory syndrome-related coronavirus
  REGION 1..14: note = Table B: HLA-DQA1*01:02-B1*06:02L HLA-DPA1*02:01-B1*13:01L
  source 1..14: note = Severe acute respiratory syndrome coronavirus 2
RRATCFSTASDTYA

SEQ ID NO: 18509 - protein, 12 aa, Severe acute respiratory syndrome-related coronavirus
  REGION 1..12: note = Table B: HLA-DQA1*01:02-B1*06:02L HLA-DQA1*05:05-B1*03:01L
  source 1..12: note = Severe acute respiratory syndrome coronavirus 2
FSTASDTYACWH

SEQ ID NO: 18510 - protein, 12 aa, Severe acute respiratory syndrome-related coronavirus
  REGION 1..12: note = Table B: HLA-DQA1*01:02-B1*06:02L HLA-DQA1*02:01-B1*03:03L
  source 1..12: note = Severe acute respiratory syndrome coronavirus 2
STASDTYACWHH

SEQ ID NO: 18511 - protein, 12 aa, Severe acute respiratory syndrome-related coronavirus
  REGION 1..12: note = Table B: HLA-DQA1*01:02-B1*06:02L HLA-DQA1*01:03-B1*06:01L HLA-DQA1*02:01-B1*03:03L
  source 1..12: note = Severe acute respiratory syndrome coronavirus 2
TASDTYACWHHS

SEQ ID NO: 18512 - protein, 11 aa, Severe acute respiratory syndrome-related coronavirus
  REGION 1..11: note = Table B: HLA-DQA1*01:02-B1*06:02L HLA-DRB1*08:01L HLA-DQA1*01:03-B1*06:01L
  source 1..11: note = Severe acute respiratory syndrome coronavirus 2
DTYACWHHSIG

SEQ ID NO: 18513 - protein, 12 aa, Severe acute respiratory syndrome-related coronavirus
  REGION 1..12: note = Table B: HLA-DQA1*01:02-B1*06:02L
  source 1..12: note = Severe acute respiratory syndrome coronavirus 2
TYACWHHSIGFD

SEQ ID NO: 18514 - protein, 10 aa, Severe acute respiratory syndrome-related coronavirus
  REGION 1..10: note = Table B: HLA-DQA1*01:02-B1*06:02L HLA-DPA1*01:03-B1*03:01L HLA-DRB1*03:01L HLA-DRB1*14:02L HLA-DQA1*05:05-B1*03:19L HLA-DQA1*05:01-B1*02:01L HLA-DRB1*16:01L HLA-DQA1*02:01-B1*03:03L
  source 1..10: note = Severe acute respiratory syndrome coronavirus 2
HHSIGFDYVY

SEQ ID NO: 18515 - protein, 12 aa, Severe acute respiratory syndrome-related coronavirus
  REGION 1..12: note = Table B: HLA-DQA1*01:02-B1*06:02L HLA-DPA1*03:01-B1*105:01L HLA-DQA1*01:03-B1*06:01L
  source 1..12: note = Severe acute respiratory syndrome coronavirus 2
MIDVQQWGFTGN

SEQ ID NO: 18516 - protein, 13 aa, Severe acute respiratory syndrome-related coronavirus
  REGION 1..13: note = Table B: HLA-DQA1*01:02-B1*06:02L
  source 1..13: note = Severe acute respiratory syndrome coronavirus 2
LQSNHDLYCQVHG

SEQ ID NO: 18517 - protein, 13 aa, Severe acute respiratory syndrome-related coronavirus
  REGION 1..13: note = Table B: HLA-DQA1*01:02-B1*06:02L HLA-DQA1*01:03-B1*06:01L
  source 1..13: note = Severe acute respiratory syndrome coronavirus 2
SNHDLYCQVHGNA

SEQ ID NO: 18518 - protein, 11 aa, Severe acute respiratory syndrome-related coronavirus
  REGION 1..11: note = Table B: HLA-DQA1*01:02-B1*06:02L HLA-DQA1*01:03-B1*06:01L HLA-DQA1*02:01-B1*03:03L
  source 1..11: note = Severe acute respiratory syndrome coronavirus 2
DLYCQVHGNAH

SEQ ID NO: 18519 - protein, 12 aa, Severe acute respiratory syndrome-related coronavirus
  REGION 1..12: note = Table B: HLA-DQA1*01:02-B1*06:02L
  source 1..12: note = Severe acute respiratory syndrome coronavirus 2
VHGNAHVASCDA

SEQ ID NO: 18520 - protein, 12 aa, Severe acute respiratory syndrome-related coronavirus
  REGION 1..12: note = Table B: HLA-DQA1*01:02-B1*06:02L HLA-DQA1*01:03-B1*06:01L
  source 1..12: note = Severe acute respiratory syndrome coronavirus 2
GNAHVASCDAIM

SEQ ID NO: 18521 - protein, 11 aa, Severe acute respiratory syndrome-related coronavirus
  REGION 1..11: note = Table B: HLA-DQA1*01:02-B1*06:02L HLA-DQA1*01:03-B1*06:01L HLA-DQA1*02:01-B1*03:03L
  source 1..11: note = Severe acute respiratory syndrome coronavirus 2
DAIMTRCLAVH

SEQ ID NO: 18522 - protein, 14 aa, Severe acute respiratory syndrome-related coronavirus
  REGION 1..14: note = Table B: HLA-DQA1*01:02-B1*06:02L
  source 1..14: note = Severe acute respiratory syndrome coronavirus 2
IMTRCLAVHECFVK

SEQ ID NO: 18523 - protein, 10 aa, Severe acute respiratory syndrome-related coronavirus
  REGION 1..10: note = Table B: HLA-DQA1*01:02-B1*06:02L HLA-DQA1*01:03-B1*06:01L
  source 1..10: note = Severe acute respiratory syndrome coronavirus 2
VHECFVKRVD

SEQ ID NO: 18524 - protein, 11 aa, Severe acute respiratory syndrome-related coronavirus
  REGION 1..11: note = Table B: HLA-DQA1*01:02-B1*06:02L HLA-DRB4*03:01NL HLA-DRB1*12:01L HLA-DPA1*01:02-B1*04:01L
  source 1..11: note = Severe acute respiratory syndrome coronavirus 2
MVVKAALLADK

SEQ ID NO: 18525 - protein, 12 aa, Severe acute respiratory syndrome-related coronavirus
  REGION 1..12: note = Table B: HLA-DQA1*01:02-B1*06:02L
  source 1..12: note = Severe acute respiratory syndrome coronavirus 2
VVKAALLADKFP

SEQ ID NO: 18526 - protein, 13 aa, Severe acute respiratory syndrome-related coronavirus
  REGION 1..13: note = Table B: HLA-DQA1*01:02-B1*06:02L
  source 1..13: note = Severe acute respiratory syndrome coronavirus 2
LLADKFPVLHDIG

SEQ ID NO: 18527 - protein, 14 aa, Severe acute respiratory syndrome-related coronavirus
  REGION 1..14: note = Table B: HLA-DQA1*01:02-B1*06:02L HLA-DPA1*02:01-B1*13:01L
  source 1..14: note = Severe acute respiratory syndrome coronavirus 2
ADKFPVLHDIGNPK

SEQ ID NO: 18528 - protein, 12 aa, Severe acute respiratory syndrome-related coronavirus
  REGION 1..12: note = Table B: HLA-DQA1*01:02-B1*06:02L
  source 1..12: note = Severe acute respiratory syndrome coronavirus 2
VLHDIGNPKAIK

SEQ ID NO: 18529 - protein, 12 aa, Severe acute respiratory syndrome-related coronavirus
  REGION 1..12: note = Table B: HLA-DQA1*01:02-B1*06:02L
  source 1..12: note = Severe acute respiratory syndrome coronavirus 2
IGNPKAIKCVPQ

SEQ ID NO: 18530 - protein, 12 aa, Severe acute respiratory syndrome-related coronavirus
  REGION 1..12: note = Table B: HLA-DQA1*01:02-B1*06:02L
  source 1..12: note = Severe acute respiratory syndrome coronavirus 2
GNPKAIKCVPQA

SEQ ID NO: 18531 - protein, 11 aa, Severe acute respiratory syndrome-related coronavirus
  REGION 1..11: note = Table B: HLA-DQA1*01:02-B1*06:02L HLA-DQA1*01:03-B1*06:01L
  source 1..11: note = Severe acute respiratory syndrome coronavirus 2
AIKCVPQADVE

SEQ ID NO: 18532 - protein, 12 aa, Severe acute respiratory syndrome-related coronavirus
  REGION 1..12: note = Table B: HLA-DQA1*01:02-B1*06:02L
  source 1..12: note = Severe acute respiratory syndrome coronavirus 2
IKCVPQADVEWK

SEQ ID NO: 18533 - protein, 10 aa, Severe acute respiratory syndrome-related coronavirus
  REGION 1..10: note = Table B: HLA-DQA1*01:02-B1*06:02L HLA-DPA1*01:03-B1*03:01L HLA-DRB1*03:01L HLA-DQA1*05:05-B1*03:19L HLA-DQA1*05:01-B1*02:01L HLA-DPA1*01:03-B1*104:01L HLA-DRB1*16:01L
  source 1..10: note = Severe acute respiratory syndrome coronavirus 2
PQADVEWKFY

SEQ ID NO: 18534 - protein, 10 aa, Severe acute respiratory syndrome-related coronavirus
  REGION 1..10: note = Table B: HLA-DQA1*01:02-B1*06:02L
  source 1..10: note = Severe acute respiratory syndrome coronavirus 2
DAQPCSDKAY

SEQ ID NO: 18535 - protein, 12 aa, Severe acute respiratory syndrome-related coronavirus
  REGION 1..12: note = Table B: HLA-DQA1*01:02-B1*06:02L HLA-DRB1*08:01L
  source 1..12: note = Severe acute respiratory syndrome coronavirus 2
SYATHSDKFTDG

SEQ ID NO: 18536 - protein, 13 aa, Severe acute respiratory syndrome-related coronavirus
  REGION 1..13: note = Table B: HLA-DQA1*01:02-B1*06:02L HLA-DPA1*03:01-B1*105:01L
  source 1..13: note = Severe acute respiratory syndrome coronavirus 2
SDKFTDGVCLFWN

SEQ ID NO: 18537 - protein, 14 aa, Severe acute respiratory syndrome-related coronavirus
  REGION 1..14: note = Table B: HLA-DQA1*01:02-B1*06:02L
  source 1..14: note = Severe acute respiratory syndrome coronavirus 2
DKFTDGVCLFWNCN

SEQ ID NO: 18538 - protein, 14 aa, Severe acute respiratory syndrome-related coronavirus
  REGION 1..14: note = Table B: HLA-DQA1*01:02-B1*06:02L
  source 1..14: note = Severe acute respiratory syndrome coronavirus 2
TDGVCLFWNCNVDR

SEQ ID NO: 18539 - protein, 12 aa, Severe acute respiratory syndrome-related coronavirus
  REGION 1..12: note = Table B: HLA-DQA1*01:02-B1*06:02L HLA-DPA1*03:01-B1*04:02L HLA-DPA1*01:03-B1*04:02L HLA-DQA1*01:03-B1*06:01L HLA-DRB1*15:03L
  source 1..12: note = Severe acute respiratory syndrome coronavirus 2
LFWNCNVDRYPA

SEQ ID NO: 18540 - protein, 11 aa, Severe acute respiratory syndrome-related coronavirus
  REGION 1..11: note = Table B: HLA-DQA1*01:02-B1*06:02L
  source 1..11: note = Severe acute respiratory syndrome coronavirus 2
WNCNVDRYPAN

SEQ ID NO: 18541 - protein, 10 aa, Severe acute respiratory syndrome-related coronavirus
  REGION 1..10: note = Table B: HLA-DQA1*01:02-B1*06:02M HLA-DPA1*02:01-B1*13:01L HLA-DPA1*03:01-B1*105:01L HLA-DQA1*01:03-B1*06:01L HLA-DRB1*15:03L
  source 1..10: note = Severe acute respiratory syndrome coronavirus 2
YPANSIVCRF

SEQ ID NO: 18542 - protein, 12 aa, Severe acute respiratory syndrome-related coronavirus
  REGION 1..12: note = Table B: HLA-DQA1*01:02-B1*06:02L
  source 1..12: note = Severe acute respiratory syndrome coronavirus 2
PANSIVCRFDTR

SEQ ID NO: 18543 - protein, 14 aa, Severe acute respiratory syndrome-related coronavirus
  REGION 1..14: note = Table B: HLA-DQA1*01:02-B1*06:02L HLA-DRB1*01:02L HLA-DRB1*08:04L HLA-DRB1*14:01L HLA-DRB1*04:08L
  source 1..14: note = Severe acute respiratory syndrome coronavirus 2
DTRVLSNLNLPGCD

SEQ ID NO: 18544 - protein, 14 aa, Severe acute respiratory syndrome-related coronavirus
  REGION 1..14: note = Table B: HLA-DQA1*01:02-B1*06:02L
  source 1..14: note = Severe acute respiratory syndrome coronavirus 2
SNLNLPGCDGGSLY

SEQ ID NO: 18545 - protein, 14 aa, Severe acute respiratory syndrome-related coronavirus
  REGION 1..14: note = Table B: HLA-DQA1*01:02-B1*06:02L
  source 1..14: note = Severe acute respiratory syndrome coronavirus 2
PGCDGGSLYVNKHA

SEQ ID NO: 18546 - protein, 12 aa, Severe acute respiratory syndrome-related coronavirus
  REGION 1..12: note = Table B: HLA-DQA1*01:02-B1*06:02L HLA-DRB1*01:02L HLA-DRB1*08:04L HLA-DRB1*14:01L HLA-DRB1*11:04L HLA-DRB1*08:01L HLA-DRB1*11:01L HLA-DRB1*12:01L
  source 1..12: note = Severe acute respiratory syndrome coronavirus 2
LYVNKHAFHTPA

SEQ ID NO: 18547 - protein, 11 aa, Severe acute respiratory syndrome-related coronavirus
  REGION 1..11: note = Table B: HLA-DQA1*01:02-B1*06:02L HLA-DPA1*01:03-B1*04:01L HLA-DPA1*01:03-B1*04:02L HLA-DQA1*03:01-B1*03:02L HLA-DRB1*04:08L HLA-DQA1*02:01-B1*03:03L
  source 1..11: note = Severe acute respiratory syndrome coronavirus 2
FDKSAFVNLKQ

SEQ ID NO: 18548 - protein, 10 aa, Severe acute respiratory syndrome-related coronavirus
  REGION 1..10: note = Table B: HLA-DQA1*01:02-B1*06:02L HLA-DPA1*01:03-B1*03:01L HLA-DRB1*03:01L HLA-DQA1*05:05-B1*03:19L HLA-DQA1*05:01-B1*02:01L HLA-DPA1*01:03-B1*04:01L HLA-DPA1*01:03-B1*104:01L HLA-DRB1*16:01L
  REGION 1..10: note = CONT. FROM ABOVE: HLA-DQA1*02:01-B1*03:03L HLA-DRB1*15:03L
  source 1..10: note = Severe acute respiratory syndrome coronavirus 2
VNLKQLPFFY

SEQ ID NO: 18549 - protein, 12 aa, Severe acute respiratory syndrome-related coronavirus
  REGION 1..12: note = Table B: HLA-DQA1*01:02-B1*06:02L HLA-DPA1*01:03-B1*04:02L
  source 1..12: note = Severe acute respiratory syndrome coronavirus 2
SDIDYVPLKSAT

SEQ ID NO: 18550 - protein, 12 aa, Severe acute respiratory syndrome-related coronavirus
  REGION 1..12: note = Table B: HLA-DQA1*01:02-B1*06:02L HLA-DPA1*01:03-B1*03:01L HLA-DRB1*14:01L HLA-DRB1*04:08L
  source 1..12: note = Severe acute respiratory syndrome coronavirus 2
DIDYVPLKSATC

SEQ ID NO: 18551 - protein, 12 aa, Severe acute respiratory syndrome-related coronavirus
  REGION 1..12: note = Table B: HLA-DQA1*01:02-B1*06:02L HLA-DRB1*14:02L HLA-DQA1*01-B1*05L HLA-DRB1*12:01L HLA-DPA1*03:01-B1*105:01L HLA-DQA1*05:05-B1*03:01L HLA-DRB1*10:01L HLA-DQA1*02:01-B1*03:03L
  source 1..12: note = Severe acute respiratory syndrome coronavirus 2
DYVPLKSATCIT

SEQ ID NO: 18552 - protein, 13 aa, Severe acute respiratory syndrome-related coronavirus
  REGION 1..13: note = Table B: HLA-DQA1*01:02-B1*06:02L HLA-DPA1*03:01-B1*105:01L HLA-DQA1*01:03-B1*06:01L
  source 1..13: note = Severe acute respiratory syndrome coronavirus 2
VPLKSATCITRCN

SEQ ID NO: 18553 - protein, 12 aa, Severe acute respiratory syndrome-related coronavirus
  REGION 1..12: note = Table B: HLA-DQA1*01:02-B1*06:02L
  source 1..12: note = Severe acute respiratory syndrome coronavirus 2
KSATCITRCNLG

SEQ ID NO: 18554 - protein, 14 aa, Severe acute respiratory syndrome-related coronavirus
  REGION 1..14: note = Table B: HLA-DQA1*01:02-B1*06:02L
  source 1..14: note = Severe acute respiratory syndrome coronavirus 2
SATCITRCNLGGAV

SEQ ID NO: 18555 - protein, 11 aa, Severe acute respiratory syndrome-related coronavirus
  REGION 1..11: note = Table B: HLA-DQA1*01:02-B1*06:02L HLA-DQA1*01:03-B1*06:01L
  source 1..11: note = Severe acute respiratory syndrome coronavirus 2
LGGAVCRHHAN

SEQ ID NO: 18556 - protein, 10 aa, Severe acute respiratory syndrome-related coronavirus
  REGION 1..10: note = Table B: HLA-DQA1*01:02-B1*06:02L HLA-DRB4*01:01L HLA-DPA1*02:01-B1*13:01L HLA-DPA1*03:01-B1*105:01L HLA-DQA1*01:03-B1*06:01L HLA-DQA1*02:01-B1*03:03L HLA-DRB1*15:03L
  source 1..10: note = Severe acute respiratory syndrome coronavirus 2
MMISAGFSLW

SEQ ID NO: 18557 - protein, 10 aa, Severe acute respiratory syndrome-related coronavirus
  REGION 1..10: note = Table B: HLA-DQA1*01:02-B1*06:02L HLA-DQA1*05:05-B1*03:19L
  source 1..10: note = Severe acute respiratory syndrome coronavirus 2
ISAGFSLWVY

SEQ ID NO: 18558 - protein, 12 aa, Severe acute respiratory syndrome-related coronavirus
  REGION 1..12: note = Table B: HLA-DQA1*01:02-B1*06:02L HLA-DPA1*03:01-B1*04:02L HLA-DPA1*03:01-B1*105:01L
  source 1..12: note = Severe acute respiratory syndrome coronavirus 2
AGFSLWVYKQFD

SEQ ID NO: 18559 - protein, 12 aa, Severe acute respiratory syndrome-related coronavirus
  REGION 1..12: note = Table B: HLA-DQA1*01:02-B1*06:02L HLA-DPA1*03:01-B1*04:02L HLA-DPA1*03:01-B1*105:01L
  source 1..12: note = Severe acute respiratory syndrome coronavirus 2
GFSLWVYKQFDT

SEQ ID NO: 18560 - protein, 10 aa, Severe acute respiratory syndrome-related coronavirus
  REGION 1..10: note = Table B: HLA-DQA1*01:02-B1*06:02L HLA-DPA1*03:01-B1*04:02L HLA-DQA1*01-B1*05L HLA-DQA1*05:05-B1*03:19L HLA-DQA1*05:01-B1*02:01L HLA-DPA1*01:03-B1*04:01L HLA-DPA1*01:03-B1*04:02L HLA-DPA1*03:01-B1*105:01L
  REGION 1..10: note = CONT. FROM ABOVE: HLA-DPA1*01:02-B1*04:01L HLA-DRB1*16:01L HLA-D QA1*01:03-B1*06:01L HLA-DRB1*15:03L
  source 1..10: note = Severe acute respiratory syndrome coronavirus 2
LWVYKQFDTY

SEQ ID NO: 18561 - protein, 10 aa, Severe acute respiratory syndrome-related coronavirus
  REGION 1..10: note = Table B: HLA-DQA1*01:02-B1*06:02L HLA-DPA1*02:01-B1*13:01L HLA-DQA1*01:03-B1*06:01L HLA-DRB1*15:03L
  source 1..10: note = Severe acute respiratory syndrome coronavirus 2
YKQFDTYNLW

SEQ ID NO: 18562 - protein, 11 aa, Severe acute respiratory syndrome-related coronavirus
  REGION 1..11: note = Table B: HLA-DQA1*01:02-B1*06:02L HLA-DQA1*01-B1*05L HLA-DQA1*05:01-B1*02:01L HLA-DPA1*01:03-B1*04:01L HLA-DPA1*02:01-B1*13:01L HLA-DRB1*16:01L
  source 1..11: note = Severe acute respiratory syndrome coronavirus 2
TYNLWNTFTRL

SEQ ID NO: 18563 - protein, 11 aa, Severe acute respiratory syndrome-related coronavirus
  REGION 1..11: note = Table B: HLA-DQA1*01:02-B1*06:02L HLA-DRB1*01:02L HLA-DQA1*01-B1*05L HLA-DPA1*01:03-B1*04:01L HLA-DPA1*01:03-B1*04:02L HLA-DRB1*16:01L
  source 1..11: note = Severe acute respiratory syndrome coronavirus 2
YNLWNTFTRLQ

SEQ ID NO: 18564 - protein, 12 aa, Severe acute respiratory syndrome-related coronavirus
  REGION 1..12: note = Table B: HLA-DQA1*01:02-B1*06:02L HLA-DRB1*11:01L HLA-DPA1*01:03-B1*04:02L HLA-DRB1*04:08L
  source 1..12: note = Severe acute respiratory syndrome coronavirus 2
NLWNTFTRLQSL

SEQ ID NO: 18565 - protein, 10 aa, Severe acute respiratory syndrome-related coronavirus
  REGION 1..10: note = Table B: HLA-DQA1*01:02-B1*06:02L HLA-DPA1*01:02-B1*04:01L HLA-DQA1*01:03-B1*06:01L HLA-DQA1*02:01-B1*03:03L
  source 1..10: note = Severe acute respiratory syndrome coronavirus 2
NTFTRLQSLE

SEQ ID NO: 18566 - protein, 10 aa, Severe acute respiratory syndrome-related coronavirus
  REGION 1..10: note = Table B: HLA-DQA1*01:02-B1*06:02L HLA-DPA1*02:01-B1*13:01L HLA-DQA1*01:03-B1*06:01L
  source 1..10: note = Severe acute respiratory syndrome coronavirus 2
AFNVVNKGHF

SEQ ID NO: 18567 - protein, 14 aa, Severe acute respiratory syndrome-related coronavirus
  REGION 1..14: note = Table B: HLA-DQA1*01:02-B1*06:02L
  source 1..14: note = Severe acute respiratory syndrome coronavirus 2
VNKGHFDGQQGEVP

SEQ ID NO: 18568 - protein, 10 aa, Severe acute respiratory syndrome-related coronavirus
  REGION 1..10: note = Table B: HLA-DQA1*01:02-B1*06:02L HLA-DPA1*01:03-B1*03:01L HLA-DQA1*05:05-B1*03:19L HLA-DQA1*05:01-B1*02:01L HLA-DPA1*03:01-B1*105:01L HLA-DRB1*15:03L
  source 1..10: note = Severe acute respiratory syndrome coronavirus 2
PVSIINNTVY

SEQ ID NO: 18569 - protein, 12 aa, Severe acute respiratory syndrome-related coronavirus
  REGION 1..12: note = Table B: HLA-DQA1*01:02-B1*06:02L HLA-DPA1*01:03-B1*04:01L HLA-DPA1*01:03-B1*04:02L
  source 1..12: note = Severe acute respiratory syndrome coronavirus 2
GVDVELFENKTT

SEQ ID NO: 18570 - protein, 13 aa, Severe acute respiratory syndrome-related coronavirus
  REGION 1..13: note = Table B: HLA-DQA1*01:02-B1*06:02L HLA-DRB1*15:03L
  source 1..13: note = Severe acute respiratory syndrome coronavirus 2
VDVELFENKTTLP

SEQ ID NO: 18571 - protein, 11 aa, Severe acute respiratory syndrome-related coronavirus
  REGION 1..11: note = Table B: HLA-DQA1*01:02-B1*06:02L HLA-DQA1*05:05-B1*03:19L HLA-DPA1*01:03-B1*104:01L HLA-DRB1*15:03L
  source 1..11: note = Severe acute respiratory syndrome coronavirus 2
TTLPVNVAFEL

SEQ ID NO: 18572 - protein, 12 aa, Severe acute respiratory syndrome-related coronavirus
  REGION 1..12: note = Table B: HLA-DQA1*01:02-B1*06:02L
  source 1..12: note = Severe acute respiratory syndrome coronavirus 2
PVPEVKILNNLG

SEQ ID NO: 18573 - protein, 11 aa, Severe acute respiratory syndrome-related coronavirus
  REGION 1..11: note = Table B: HLA-DQA1*01:02-B1*06:02L
  source 1..11: note = Severe acute respiratory syndrome coronavirus 2
GVDIAANTVIW

SEQ ID NO: 18574 - protein, 10 aa, Severe acute respiratory syndrome-related coronavirus
  REGION 1..10: note = Table B: HLA-DQA1*01:02-B1*06:02L HLA-DQA1*03:01-B1*03:02L HLA-DQA1*05:05-B1*03:01L HLA-DQA1*01:03-B1*06:01L HLA-DQA1*02:01-B1*03:03L
  source 1..10: note = Severe acute respiratory syndrome coronavirus 2
AANTVIWDYK

SEQ ID NO: 18575 - protein, 11 aa, Severe acute respiratory syndrome-related coronavirus
  REGION 1..11: note = Table B: HLA-DQA1*01:02-B1*06:02L
  source 1..11: note = Severe acute respiratory syndrome coronavirus 2
RDAPAHISTIG

SEQ ID NO: 18576 - protein, 12 aa, Severe acute respiratory syndrome-related coronavirus
  REGION 1..12: note = Table B: HLA-DQA1*01:02-B1*06:02L HLA-DQA1*01:03-B1*06:01L
  source 1..12: note = Severe acute respiratory syndrome coronavirus 2
HISTIGVCSMTD

SEQ ID NO: 18577 - protein, 13 aa, Severe acute respiratory syndrome-related coronavirus
  REGION 1..13: note = Table B: HLA-DQA1*01:02-B1*06:02L HLA-DQA1*01:03-B1*06:01L
  source 1..13: note = Severe acute respiratory syndrome coronavirus 2
ISTIGVCSMTDIA

SEQ ID NO: 18578 - protein, 12 aa, Severe acute respiratory syndrome-related coronavirus
  REGION 1..12: note = Table B: HLA-DQA1*01:02-B1*06:02L HLA-DQA1*01:03-B1*06:01L
  source 1..12: note = Severe acute respiratory syndrome coronavirus 2
TIGVCSMTDIAK

SEQ ID NO: 18579 - protein, 13 aa, Severe acute respiratory syndrome-related coronavirus
  REGION 1..13: note = Table B: HLA-DQA1*01:02-B1*06:02L HLA-DQA1*01:03-B1*06:01L HLA-DQA1*02:01-B1*03:03L
  source 1..13: note = Severe acute respiratory syndrome coronavirus 2
IGVCSMTDIAKKP

SEQ ID NO: 18580 - protein, 14 aa, Severe acute respiratory syndrome-related coronavirus
  REGION 1..14: note = Table B: HLA-DQA1*01:02-B1*06:02L
  source 1..14: note = Severe acute respiratory syndrome coronavirus 2
GVCSMTDIAKKPTE

SEQ ID NO: 18581 - protein, 12 aa, Severe acute respiratory syndrome-related coronavirus
  REGION 1..12: note = Table B: HLA-DQA1*01:02-B1*06:02L HLA-DRB1*08:01L HLA-DQA1*05:05-B1*03:19L HLA-DQA1*05:05-B1*03:01L
  source 1..12: note = Severe acute respiratory syndrome coronavirus 2
SMTDIAKKPTET

SEQ ID NO: 18582 - protein, 10 aa, Severe acute respiratory syndrome-related coronavirus
  REGION 1..10: note = Table B: HLA-DQA1*01:02-B1*06:02L
  source 1..10: note = Severe acute respiratory syndrome coronavirus 2
ETICAPLTVF

SEQ ID NO: 18583 - protein, 13 aa, Severe acute respiratory syndrome-related coronavirus
  REGION 1..13: note = Table B: HLA-DQA1*01:02-B1*06:02L HLA-DQA1*01:03-B1*06:01L
  source 1..13: note = Severe acute respiratory syndrome coronavirus 2
FRNARNGVLITEG

SEQ ID NO: 18584 - protein, 13 aa, Severe acute respiratory syndrome-related coronavirus
  REGION 1..13: note = Table B: HLA-DQA1*01:02-B1*06:02L HLA-DQA1*03:01-B1*03:02L HLA-DQA1*02:01-B1*03:03L
  source 1..13: note = Severe acute respiratory syndrome coronavirus 2
NARNGVLITEGSV

SEQ ID NO: 18585 - protein, 12 aa, Severe acute respiratory syndrome-related coronavirus
  REGION 1..12: note = Table B: HLA-DQA1*01:02-B1*06:02L
  source 1..12: note = Severe acute respiratory syndrome coronavirus 2
RNGVLITEGSVK

SEQ ID NO: 18586 - protein, 11 aa, Severe acute respiratory syndrome-related coronavirus
  REGION 1..11: note = Table B: HLA-DQA1*01:02-B1*06:02L HLA-DPA1*03:01-B1*04:02L HLA-DRB1*14:01L HLA-DRB1*14:02L HLA-DQA1*05:05-B1*03:19L HLA-DQA1*05:01-B1*02:01L HLA-DQA1*05:05-B1*03:116L HLA-DPA1*03:01-B1*105:01L HLA-DPA1*01:02-B1*04:01L
  source 1..11: note = Severe acute respiratory syndrome coronavirus 2
VLITEGSVKGL

SEQ ID NO: 18587 - protein, 13 aa, Severe acute respiratory syndrome-related coronavirus
  REGION 1..13: note = Table B: HLA-DQA1*01:02-B1*06:02L HLA-DQA1*01:03-B1*06:01L
  source 1..13: note = Severe acute respiratory syndrome coronavirus 2
GLQPSVGPKQASL

SEQ ID NO: 18588 - protein, 13 aa, Severe acute respiratory syndrome-related coronavirus
  REGION 1..13: note = Table B: HLA-DQA1*01:02-B1*06:02L HLA-DQA1*05:05-B1*03:19L HLA-DQA1*05:05-B1*03:01L
  source 1..13: note = Severe acute respiratory syndrome coronavirus 2
LQPSVGPKQASLN

SEQ ID NO: 18589 - protein, 14 aa, Severe acute respiratory syndrome-related coronavirus
  REGION 1..14: note = Table B: HLA-DQA1*01:02-B1*06:02L HLA-DRB1*01:02L HLA-DQA1*05:05-B1*03:19L HLA-DQA1*05:05-B1*03:01L HLA-DQA1*01:03-B1*06:01L
  source 1..14: note = Severe acute respiratory syndrome coronavirus 2
GPKQASLNGVTLIG

SEQ ID NO: 18590 - protein, 13 aa, Severe acute respiratory syndrome-related coronavirus
  REGION 1..13: note = Table B: HLA-DQA1*01:02-B1*06:02L HLA-DQA1*01:03-B1*06:01L
  source 1..13: note = Severe acute respiratory syndrome coronavirus 2
QASLNGVTLIGEA

SEQ ID NO: 18591 - protein, 12 aa, Severe acute respiratory syndrome-related coronavirus
  REGION 1..12: note = Table B: HLA-DQA1*01:02-B1*06:02L HLA-DQA1*01:03-B1*06:01L
  source 1..12: note = Severe acute respiratory syndrome coronavirus 2
SLNGVTLIGEAV

SEQ ID NO: 18592 - protein, 11 aa, Severe acute respiratory syndrome-related coronavirus
  REGION 1..11: note = Table B: HLA-DQA1*01:02-B1*06:02L
  source 1..11: note = Severe acute respiratory syndrome coronavirus 2
IGEAVKTQFNY

SEQ ID NO: 18593 - protein, 13 aa, Severe acute respiratory syndrome-related coronavirus
  REGION 1..13: note = Table B: HLA-DQA1*01:02-B1*06:02L HLA-DRB1*16:01L
  source 1..13: note = Severe acute respiratory syndrome coronavirus 2
AVKTQFNYYKKVD

SEQ ID NO: 18594 - protein, 12 aa, Severe acute respiratory syndrome-related coronavirus
  REGION 1..12: note = Table B: HLA-DQA1*01:02-B1*06:02L HLA-DRB1*08:04L HLA-DRB1*14:01L HLA-DRB1*11:04L HLA-DRB1*11:01L HLA-DPA1*02:01-B1*13:01L HLA-DRB1*10:01L HLA-DRB1*08:03L HLA-DRB1*15:03L
  source 1..12: note = Severe acute respiratory syndrome coronavirus 2
NYYKKVDGVVQQ

SEQ ID NO: 18595 - protein, 13 aa, Severe acute respiratory syndrome-related coronavirus
  REGION 1..13: note = Table B: HLA-DQA1*01:02-B1*06:02L HLA-DQA1*01:03-B1*06:01L
  source 1..13: note = Severe acute respiratory syndrome coronavirus 2
YKKVDGVVQQLPE

SEQ ID NO: 18596 - protein, 13 aa, Severe acute respiratory syndrome-related coronavirus
  REGION 1..13: note = Table B: HLA-DQA1*01:02-B1*06:02L
  source 1..13: note = Severe acute respiratory syndrome coronavirus 2
KKVDGVVQQLPET

SEQ ID NO: 18597 - protein, 13 aa, Severe acute respiratory syndrome-related coronavirus
  REGION 1..13: note = Table B: HLA-DQA1*01:02-B1*06:02L
  source 1..13: note = Severe acute respiratory syndrome coronavirus 2
QSRNLQEFKPRSQ

SEQ ID NO: 18598 - protein, 12 aa, Severe acute respiratory syndrome-related coronavirus
  REGION 1..12: note = Table B: HLA-DQA1*01:02-B1*06:02L HLA-DRB1*08:01L
  source 1..12: note = Severe acute respiratory syndrome coronavirus 2
NLQEFKPRSQME

SEQ ID NO: 18599 - protein, 13 aa, Severe acute respiratory syndrome-related coronavirus
  REGION 1..13: note = Table B: HLA-DQA1*01:02-B1*06:02L HLA-DQA1*01-B1*05L HLA-DPA1*03:01-B1*105:01L HLA-DRB1*15:03L
  source 1..13: note = Severe acute respiratory syndrome coronavirus 2
DFLELAMDEFIER

SEQ ID NO: 18600 - protein, 13 aa, Severe acute respiratory syndrome-related coronavirus
  REGION 1..13: note = Table B: HLA-DQA1*01:02-B1*06:02L
  source 1..13: note = Severe acute respiratory syndrome coronavirus 2
AMDEFIERYKLEG

SEQ ID NO: 18601 - protein, 11 aa, Severe acute respiratory syndrome-related coronavirus
  REGION 1..11: note = Table B: HLA-DQA1*01:02-B1*06:02L HLA-DQA1*02:01-B1*03:03L
  source 1..11: note = Severe acute respiratory syndrome coronavirus 2
EFIERYKLEGY

SEQ ID NO: 18602 - protein, 10 aa, Severe acute respiratory syndrome-related coronavirus
  REGION 1..10: note = Table B: HLA-DQA1*01:02-B1*06:02L HLA-DQA1*01:03-B1*06:01L HLA-DQA1*02:01-B1*03:03L
  source 1..10: note = Severe acute respiratory syndrome coronavirus 2
ERYKLEGYAF

SEQ ID NO: 18603 - protein, 12 aa, Severe acute respiratory syndrome-related coronavirus
  REGION 1..12: note = Table B: HLA-DQA1*01:02-B1*06:02L
  source 1..12: note = Severe acute respiratory syndrome coronavirus 2
HSQLGGLHLLIG

SEQ ID NO: 18604 - protein, 12 aa, Severe acute respiratory syndrome-related coronavirus
  REGION 1..12: note = Table B: HLA-DQA1*01:02-B1*06:02L
  source 1..12: note = Severe acute respiratory syndrome coronavirus 2
QLGGLHLLIGLA

SEQ ID NO: 18605 - protein, 12 aa, Severe acute respiratory syndrome-related coronavirus
  REGION 1..12: note = Table B: HLA-DQA1*01:02-B1*06:02L HLA-DQA1*01:03-B1*06:01L HLA-DQA1*02:01-B1*03:03L
  source 1..12: note = Severe acute respiratory syndrome coronavirus 2
LGGLHLLIGLAK

SEQ ID NO: 18606 - protein, 10 aa, Severe acute respiratory syndrome-related coronavirus
  REGION 1..10: note = Table B: HLA-DQA1*01:02-B1*06:02L HLA-DQA1*02:01-B1*03:03L
  source 1..10: note = Severe acute respiratory syndrome coronavirus 2
HLLIGLAKRF

SEQ ID NO: 18607 - protein, 14 aa, Severe acute respiratory syndrome-related coronavirus
  REGION 1..14: note = Table B: HLA-DQA1*01:02-B1*06:02L HLA-DRB1*01:02L HLA-DRB1*08:01L HLA-DRB3*01:01L
  source 1..14: note = Severe acute respiratory syndrome coronavirus 2
LLIGLAKRFKESPF

SEQ ID NO: 18608 - protein, 11 aa, Severe acute respiratory syndrome-related coronavirus
  REGION 1..11: note = Table B: HLA-DQA1*01:02-B1*06:02L HLA-DPA1*03:01-B1*105:01L HLA-DQA1*01:03-B1*06:01L
  source 1..11: note = Severe acute respiratory syndrome coronavirus 2
FKESPFELEDF

SEQ ID NO: 18609 - protein, 12 aa, Severe acute respiratory syndrome-related coronavirus
  REGION 1..12: note = Table B: HLA-DQA1*01:02-B1*06:02L HLA-DPA1*02:01-B1*13:01L
  source 1..12: note = Severe acute respiratory syndrome coronavirus 2
ESPFELEDFIPM

SEQ ID NO: 18610 - protein, 13 aa, Severe acute respiratory syndrome-related coronavirus
  REGION 1..13: note = Table B: HLA-DQA1*01:02-B1*06:02L HLA-DQA1*05:01-B1*02:01L
  source 1..13: note = Severe acute respiratory syndrome coronavirus 2
PFELEDFIPMDST

SEQ ID NO: 18611 - protein, 10 aa, Severe acute respiratory syndrome-related coronavirus
  REGION 1..10: note = Table B: HLA-DQA1*01:02-B1*06:02L HLA-DQA1*05:05-B1*03:19L HLA-DQA1*01:03-B1*06:01L HLA-DQA1*02:01-B1*03:03L
  source 1..10: note = Severe acute respiratory syndrome coronavirus 2
PMDSTVKNYF

SEQ ID NO: 18612 - protein, 14 aa, Severe acute respiratory syndrome-related coronavirus
  REGION 1..14: note = Table B: HLA-DQA1*01:02-B1*06:02L
  source 1..14: note = Severe acute respiratory syndrome coronavirus 2
DAQTGSSKCVCSVI

SEQ ID NO: 18613 - protein, 12 aa, Severe acute respiratory syndrome-related coronavirus
  REGION 1..12: note = Table B: HLA-DQA1*01:02-B1*06:02L
  source 1..12: note = Severe acute respiratory syndrome coronavirus 2
TGSSKCVCSVID

SEQ ID NO: 18614 - protein, 12 aa, Severe acute respiratory syndrome-related coronavirus
  REGION 1..12: note = Table B: HLA-DQA1*01:02-B1*06:02L
  source 1..12: note = Severe acute respiratory syndrome coronavirus 2
LLDDFVEIIKSQ

SEQ ID NO: 18615 - protein, 13 aa, Severe acute respiratory syndrome-related coronavirus
  REGION 1..13: note = Table B: HLA-DQA1*01:02-B1*06:02L
  source 1..13: note = Severe acute respiratory syndrome coronavirus 2
IKSQDLSVVSKVV

SEQ ID NO: 18616 - protein, 12 aa, Severe acute respiratory syndrome-related coronavirus
  REGION 1..12: note = Table B: HLA-DQA1*01:02-B1*06:02L HLA-DPA1*03:01-B1*04:02L HLA-DPA1*01:03-B1*04:01L HLA-DPA1*01:03-B1*04:02L HLA-DPA1*03:01-B1*105:01L HLA-DPA1*01:02-B1*04:01L HLA-DQA1*01:03-B1*06:01L
  source 1..12: note = Severe acute respiratory syndrome coronavirus 2
TEISFMLWCKDG

SEQ ID NO: 18617 - protein, 12 aa, Severe acute respiratory syndrome-related coronavirus
  REGION 1..12: note = Table B: HLA-DQA1*01:02-B1*06:02L HLA-DPA1*03:01-B1*105:01L HLA-DRB1*15:03L
  source 1..12: note = Severe acute respiratory syndrome coronavirus 2
SFMLWCKDGHVE

SEQ ID NO: 18618 - protein, 15 aa, Severe acute respiratory syndrome-related coronavirus
  REGION 1..15: note = Table B: HLA-DQA1*01:02-B1*06:02L HLA-DRB1*01:02L HLA-DRB1*03:01L
  source 1..15: note = Severe acute respiratory syndrome coronavirus 2
MLWCKDGHVETFYPK

SEQ ID NO: 18619 - protein, 12 aa, Severe acute respiratory syndrome-related coronavirus
  REGION 1..12: note = Table B: HLA-DQA1*01:02-B1*06:02L HLA-DQA1*05:01-B1*02:01L HLA-DPA1*03:01-B1*105:01L HLA-DRB1*16:01L HLA-DQA1*01:03-B1*06:01L
  source 1..12: note = Severe acute respiratory syndrome coronavirus 2
DGHVETFYPKLQ

SEQ ID NO: 18620 - protein, 13 aa, Severe acute respiratory syndrome-related coronavirus
  REGION 1..13: note = Table B: HLA-DQA1*01:02-B1*06:02L HLA-DRB1*01:02L HLA-DRB1*08:04L HLA-DRB1*11:04L
  source 1..13: note = Severe acute respiratory syndrome coronavirus 2
PNLYKMQRMLLEK

SEQ ID NO: 18621 - protein, 15 aa, Severe acute respiratory syndrome-related coronavirus
  REGION 1..15: note = Table B: HLA-DQA1*01:02-B1*06:02L HLA-DPA1*03:01-B1*105:01L
  source 1..15: note = Severe acute respiratory syndrome coronavirus 2
YKMQRMLLEKCDLQN

SEQ ID NO: 18622 - protein, 12 aa, Severe acute respiratory syndrome-related coronavirus
  REGION 1..12: note = Table B: HLA-DQA1*01:02-B1*06:02L HLA-DPA1*03:01-B1*105:01L HLA-DQA1*01:03-B1*06:01L
  source 1..12: note = Severe acute respiratory syndrome coronavirus 2
MLLEKCDLQNYG

SEQ ID NO: 18623 - protein, 12 aa, Severe acute respiratory syndrome-related coronavirus
  REGION 1..12: note = Table B: HLA-DQA1*01:02-B1*06:02L HLA-DPA1*03:01-B1*105:01L HLA-DQA1*01:03-B1*06:01L
  source 1..12: note = Severe acute respiratory syndrome coronavirus 2
LEKCDLQNYGDS

SEQ ID NO: 18624 - protein, 11 aa, Severe acute respiratory syndrome-related coronavirus
  REGION 1..11: note = Table B: HLA-DQA1*01:02-B1*06:02L HLA-DRB1*01:02L HLA-DPA1*01:03-B1*03:01L HLA-DRB1*11:03L HLA-DRB1*08:01L HLA-DRB5*01:01L HLA-DPA1*01:03-B1*04:02L HLA-DRB1*12:02L HLA-DRB1*10:01L HLA-DRB1*15:03L
  source 1..11: note = Severe acute respiratory syndrome coronavirus 2
NYGDSATLPKG

SEQ ID NO: 18625 - protein, 11 aa, Severe acute respiratory syndrome-related coronavirus
  REGION 1..11: note = Table B: HLA-DQA1*01:02-B1*06:02L HLA-DQA1*03:01-B1*03:02L HLA-DQA1*02:01-B1*03:03L
  source 1..11: note = Severe acute respiratory syndrome coronavirus 2
LPKGIMMNVAK

SEQ ID NO: 18626 - protein, 11 aa, Severe acute respiratory syndrome-related coronavirus
  REGION 1..11: note = Table B: HLA-DQA1*01:02-B1*06:02L
  source 1..11: note = Severe acute respiratory syndrome coronavirus 2
PKGIMMNVAKY

SEQ ID NO: 18627 - protein, 10 aa, Severe acute respiratory syndrome-related coronavirus
  REGION 1..10: note = Table B: HLA-DQA1*01:02-B1*06:02L HLA-DQA1*05:05-B1*03:19L
  source 1..10: note = Severe acute respiratory syndrome coronavirus 2
VAKYTQLCQY

SEQ ID NO: 18628 - protein, 12 aa, Severe acute respiratory syndrome-related coronavirus
  REGION 1..12: note = Table B: HLA-DQA1*01:02-B1*06:02L HLA-DPA1*03:01-B1*105:01L
  source 1..12: note = Severe acute respiratory syndrome coronavirus 2
YTQLCQYLNTLT

SEQ ID NO: 18629 - protein, 12 aa, Severe acute respiratory syndrome-related coronavirus
  REGION 1..12: note = Table B: HLA-DQA1*01:02-B1*06:02L
  source 1..12: note = Severe acute respiratory syndrome coronavirus 2
TLAVPYNMRVIH

SEQ ID NO: 18630 - protein, 12 aa, Severe acute respiratory syndrome-related coronavirus
  REGION 1..12: note = Table B: HLA-DQA1*01:02-B1*06:02L
  source 1..12: note = Severe acute respiratory syndrome coronavirus 2
NMRVIHFGAGSD

SEQ ID NO: 18631 - protein, 13 aa, Severe acute respiratory syndrome-related coronavirus
  REGION 1..13: note = Table B: HLA-DQA1*01:02-B1*06:02L HLA-DRB1*15:03L
  source 1..13: note = Severe acute respiratory syndrome coronavirus 2
MRVIHFGAGSDKG

SEQ ID NO: 18632 - protein, 14 aa, Severe acute respiratory syndrome-related coronavirus
  REGION 1..14: note = Table B: HLA-DQA1*01:02-B1*06:02L HLA-DRB1*01:02L HLA-DRB1*08:01L
  source 1..14: note = Severe acute respiratory syndrome coronavirus 2
IHFGAGSDKGVAPG

SEQ ID NO: 18633 - protein, 14 aa, Severe acute respiratory syndrome-related coronavirus
  REGION 1..14: note = Table B: HLA-DQA1*01:02-B1*06:02L HLA-DRB1*01:02L
  source 1..14: note = Severe acute respiratory syndrome coronavirus 2
FGAGSDKGVAPGTA

SEQ ID NO: 18634 - protein, 13 aa, Severe acute respiratory syndrome-related coronavirus
  REGION 1..13: note = Table B: HLA-DQA1*01:02-B1*06:02L
  source 1..13: note = Severe acute respiratory syndrome coronavirus 2
AGSDKGVAPGTAV

SEQ ID NO: 18635 - protein, 12 aa, Severe acute respiratory syndrome-related coronavirus
  REGION 1..12: note = Table B: HLA-DQA1*01:02-B1*06:02L HLA-DQA1*05:05-B1*03:19L HLA-DQA1*05:01-B1*02:01L HLA-DQA1*05:05-B1*03:01L HLA-DQA1*01:03-B1*06:01L HLA-DQA1*02:01-B1*03:03L
  source 1..12: note = Severe acute respiratory syndrome coronavirus 2
SDKGVAPGTAVL

SEQ ID NO: 18636 - protein, 12 aa, Severe acute respiratory syndrome-related coronavirus
  REGION 1..12: note = Table B: HLA-DQA1*01:02-B1*06:02L HLA-DQA1*01:03-B1*06:01L
  source 1..12: note = Severe acute respiratory syndrome coronavirus 2
PGTAVLRQWLPT

SEQ ID NO: 18637 - protein, 12 aa, Severe acute respiratory syndrome-related coronavirus
  REGION 1..12: note = Table B: HLA-DQA1*01:02-B1*06:02L
  source 1..12: note = Severe acute respiratory syndrome coronavirus 2
PTGTLLVDSDLN

SEQ ID NO: 18638 - protein, 14 aa, Severe acute respiratory syndrome-related coronavirus
  REGION 1..14: note = Table B: HLA-DQA1*01:02-B1*06:02L HLA-DPA1*03:01-B1*105:01L HLA-DRB1*16:01L HLA-DQA1*02:01-B1*03:03L
  source 1..14: note = Severe acute respiratory syndrome coronavirus 2
LVDSDLNDFVSDAD

SEQ ID NO: 18639 - protein, 15 aa, Severe acute respiratory syndrome-related coronavirus
  REGION 1..15: note = Table B: HLA-DQA1*01:02-B1*06:02L HLA-DRB1*12:01L HLA-DPA1*02:01-B1*13:01L HLA-DPA1*03:01-B1*105:01L
  source 1..15: note = Severe acute respiratory syndrome coronavirus 2
VDSDLNDFVSDADST

SEQ ID NO: 18640 - protein, 13 aa, Severe acute respiratory syndrome-related coronavirus
  REGION 1..13: note = Table B: HLA-DQA1*01:02-B1*06:02L HLA-DRB1*03:01L HLA-DQA1*01:01-B1*05:01L HLA-DPA1*01:03-B1*04:02L HLA-DPA1*01:02-B1*04:01L HLA-DQA1*01:03-B1*06:01L
  source 1..13: note = Severe acute respiratory syndrome coronavirus 2
DLNDFVSDADSTL

SEQ ID NO: 18641 - protein, 14 aa, Severe acute respiratory syndrome-related coronavirus
  REGION 1..14: note = Table B: HLA-DQA1*01:02-B1*06:02L
  source 1..14: note = Severe acute respiratory syndrome coronavirus 2
FVSDADSTLIGDCA

SEQ ID NO: 18642 - protein, 11 aa, Severe acute respiratory syndrome-related coronavirus
  REGION 1..11: note = Table B: HLA-DQA1*01:02-B1*06:02L HLA-DQA1*05:05-B1*03:01L HLA-DQA1*01:03-B1*06:01L HLA-DQA1*02:01-B1*03:03L
  source 1..11: note = Severe acute respiratory syndrome coronavirus 2
IGDCATVHTAN

SEQ ID NO: 18643 - protein, 11 aa, Severe acute respiratory syndrome-related coronavirus
  REGION 1..11: note = Table B: HLA-DQA1*01:02-B1*06:02L HLA-DQA1*02:01-B1*03:03L
  source 1..11: note = Severe acute respiratory syndrome coronavirus 2
DCATVHTANKW

SEQ ID NO: 18644 - protein, 14 aa, Severe acute respiratory syndrome-related coronavirus
  REGION 1..14: note = Table B: HLA-DQA1*01:02-B1*06:02L HLA-DRB1*14:01L HLA-DRB1*15:03L
  source 1..14: note = Severe acute respiratory syndrome coronavirus 2
ATVHTANKWDLIIS

SEQ ID NO: 18645 - protein, 13 aa, Severe acute respiratory syndrome-related coronavirus
  REGION 1..13: note = Table B: HLA-DQA1*01:02-B1*06:02L HLA-DQA1*01-B1*05L HLA-DPA1*03:01-B1*105:01L HLA-DQA1*03:01-B1*03:02L HLA-DPA1*01:02-B1*04:01L HLA-DQA1*02:01-B1*03:03L
  source 1..13: note = Severe acute respiratory syndrome coronavirus 2
VHTANKWDLIISD

SEQ ID NO: 18646 - protein, 10 aa, Severe acute respiratory syndrome-related coronavirus
  REGION 1..10: note = Table B: HLA-DQA1*01:02-B1*06:02L HLA-DPA1*01:03-B1*03:01L HLA-DRB1*03:01L HLA-DRB1*11:02L HLA-DRB1*14:02L HLA-DQA1*01-B1*05L HLA-DQA1*05:05-B1*03:19M HLA-DQA1*05:01-B1*02:01L HLA-DRB4*01:01L
  REGION 1..10: note = CONT. FROM ABOVE: HLA-DPA1*01:03-B1*04:01L HLA-DPA1*02:01-B1*13: 01L HLA-DPA1*01:03-B1*104:01L HLA-DRB1*16:01L
  source 1..10: note = Severe acute respiratory syndrome coronavirus 2
KWDLIISDMY

SEQ ID NO: 18647 - protein, 10 aa, Severe acute respiratory syndrome-related coronavirus
  REGION 1..10: note = Table B: HLA-DQA1*01:02-B1*06:02L HLA-DRB1*08:77L HLA-DPA1*01:03-B1*03:01L HLA-DRB1*03:01L HLA-DRB1*11:02L HLA-DQA1*01-B1*05L HLA-DQA1*05:05-B1*03:19M HLA-DQA1*05:01-B1*02:01L HLA-DRB4*01:01L
  REGION 1..10: note = CONT. FROM ABOVE: HLA-DPA1*01:03-B1*104:01L HLA-DRB1*10:01L HLA- DRB1*16:01L
  source 1..10: note = Severe acute respiratory syndrome coronavirus 2
NDSKEGFFTY

SEQ ID NO: 18648 - protein, 15 aa, Severe acute respiratory syndrome-related coronavirus
  REGION 1..15: note = Table B: HLA-DQA1*01:02-B1*06:02L HLA-DPA1*01:03-B1*03:01L HLA-DPA1*03:01-B1*04:02L HLA-DQA1*01-B1*05L HLA-DPA1*03:01-B1*105:01L HLA-DRB1*15:03L
  source 1..15: note = Severe acute respiratory syndrome coronavirus 2
DSKEGFFTYICGFIQ

SEQ ID NO: 18649 - protein, 10 aa, Severe acute respiratory syndrome-related coronavirus
  REGION 1..10: note = Table B: HLA-DQA1*01:02-B1*06:02L HLA-DPA1*03:01-B1*105:01L HLA-DQA1*03:01-B1*03:02L HLA-DPA1*01:02-B1*04:01L HLA-DQA1*01:03-B1*06:01L HLA-DQA1*02:01-B1*03:03L
  source 1..10: note = Severe acute respiratory syndrome coronavirus 2
TYICGFIQQK

SEQ ID NO: 18650 - protein, 12 aa, Severe acute respiratory syndrome-related coronavirus
  REGION 1..12: note = Table B: HLA-DQA1*01:02-B1*06:02L HLA-DRB1*14:01L HLA-DQA1*03:01-B1*03:02L HLA-DRB1*04:08L HLA-DQA1*02:01-B1*03:03L
  source 1..12: note = Severe acute respiratory syndrome coronavirus 2
GFIQQKLALGGS

SEQ ID NO: 18651 - protein, 12 aa, Severe acute respiratory syndrome-related coronavirus
  REGION 1..12: note = Table B: HLA-DQA1*01:02-B1*06:02L HLA-DRB1*14:01L HLA-DPA1*03:01-B1*105:01L HLA-DQA1*03:01-B1*03:02L HLA-DQA1*02:01-B1*03:03L
  source 1..12: note = Severe acute respiratory syndrome coronavirus 2
FIQQKLALGGSV

SEQ ID NO: 18652 - protein, 11 aa, Severe acute respiratory syndrome-related coronavirus
  REGION 1..11: note = Table B: HLA-DQA1*01:02-B1*06:02L
  source 1..11: note = Severe acute respiratory syndrome coronavirus 2
GGSVAIKITEH

SEQ ID NO: 18653 - protein, 12 aa, Severe acute respiratory syndrome-related coronavirus
  REGION 1..12: note = Table B: HLA-DQA1*01:02-B1*06:02L HLA-DPA1*03:01-B1*105:01L HLA-DQA1*01:03-B1*06:01L
  source 1..12: note = Severe acute respiratory syndrome coronavirus 2
IKITEHSWNADL

SEQ ID NO: 18654 - protein, 12 aa, Severe acute respiratory syndrome-related coronavirus
  REGION 1..12: note = Table B: HLA-DQA1*01:02-B1*06:02L HLA-DPA1*01:03-B1*04:02L
  source 1..12: note = Severe acute respiratory syndrome coronavirus 2
SWNADLYKLMGH

SEQ ID NO: 18655 - protein, 11 aa, Severe acute respiratory syndrome-related coronavirus
  REGION 1..11: note = Table B: HLA-DQA1*01:02-B1*06:02L HLA-DQA1*01:03-B1*06:01L HLA-DQA1*02:01-B1*03:03L
  source 1..11: note = Severe acute respiratory syndrome coronavirus 2
NADLYKLMGHF

SEQ ID NO: 18656 - protein, 10 aa, Severe acute respiratory syndrome-related coronavirus
  REGION 1..10: note = Table B: HLA-DQA1*01:02-B1*06:02L HLA-DPA1*03:01-B1*04:02L HLA-DQA1*01-B1*05L HLA-DPA1*01:03-B1*04:01L HLA-DPA1*01:03-B1*04:02L HLA-DPA1*03:01-B1*105:01L HLA-DPA1*01:02-B1*04:01L HLA-DQA1*01:03-B1*06:01L
  source 1..10: note = Severe acute respiratory syndrome coronavirus 2
WWTAFVTNVN

SEQ ID NO: 18657 - protein, 13 aa, Severe acute respiratory syndrome-related coronavirus
  REGION 1..13: note = Table B: HLA-DQA1*01:02-B1*06:02L HLA-DPA1*03:01-B1*105:01L
  source 1..13: note = Severe acute respiratory syndrome coronavirus 2
NASSSEAFLIGCN

SEQ ID NO: 18658 - protein, 11 aa, Severe acute respiratory syndrome-related coronavirus
  REGION 1..11: note = Table B: HLA-DQA1*01:02-B1*06:02L
  source 1..11: note = Severe acute respiratory syndrome coronavirus 2
SSEAFLIGCNY

SEQ ID NO: 18659 - protein, 11 aa, Severe acute respiratory syndrome-related coronavirus
  REGION 1..11: note = Table B: HLA-DQA1*01:02-B1*06:02L HLA-DPA1*01:02-B1*04:01L
  source 1..11: note = Severe acute respiratory syndrome coronavirus 2
LIGCNYLGKPR

SEQ ID NO: 18660 - protein, 12 aa, Severe acute respiratory syndrome-related coronavirus
  REGION 1..12: note = Table B: HLA-DQA1*01:02-B1*06:02L
  source 1..12: note = Severe acute respiratory syndrome coronavirus 2
IGCNYLGKPREQ

SEQ ID NO: 18661 - protein, 10 aa, Severe acute respiratory syndrome-related coronavirus
  REGION 1..10: note = Table B: HLA-DQA1*01:02-B1*06:02L HLA-DQA1*01:03-B1*06:01L
  source 1..10: note = Severe acute respiratory syndrome coronavirus 2
YLGKPREQID

SEQ ID NO: 18662 - protein, 14 aa, Severe acute respiratory syndrome-related coronavirus
  REGION 1..14: note = Table B: HLA-DQA1*01:02-B1*06:02L
  source 1..14: note = Severe acute respiratory syndrome coronavirus 2
VMHANYIFWRNTNP

SEQ ID NO: 18663 - protein, 12 aa, Severe acute respiratory syndrome-related coronavirus
  REGION 1..12: note = Table B: HLA-DQA1*01:02-B1*06:02L HLA-DRB1*08:04L HLA-DPA1*01:03-B1*03:01L HLA-DRB1*11:04L HLA-DRB1*12:02L HLA-DQA1*05:05-B1*03:01L HLA-DRB1*14:17L HLA-DRB1*04:08L
  source 1..12: note = Severe acute respiratory syndrome coronavirus 2
FWRNTNPIQLSS

SEQ ID NO: 18664 - protein, 13 aa, Severe acute respiratory syndrome-related coronavirus
  REGION 1..13: note = Table B: HLA-DQA1*01:02-B1*06:02L
  source 1..13: note = Severe acute respiratory syndrome coronavirus 2
IQLSSYSLFDMSK

SEQ ID NO: 18665 - protein, 11 aa, Severe acute respiratory syndrome-related coronavirus
  REGION 1..11: note = Table B: HLA-DQA1*01:02-B1*06:02L
  source 1..11: note = Severe acute respiratory syndrome coronavirus 2
SSYSLFDMSKF

SEQ ID NO: 18666 - protein, 14 aa, Severe acute respiratory syndrome-related coronavirus
  REGION 1..14: note = Table B: HLA-DQA1*01:02-B1*06:02L
  source 1..14: note = Severe acute respiratory syndrome coronavirus 2
FDMSKFPLKLRGTA

SEQ ID NO: 18667 - protein, 12 aa, Severe acute respiratory syndrome-related coronavirus
  REGION 1..12: note = Table B: HLA-DQA1*01:02-B1*06:02L HLA-DQA1*05:05-B1*03:01L
  source 1..12: note = Severe acute respiratory syndrome coronavirus 2
RGTAVMSLKEGQ

SEQ ID NO: 18668 - protein, 12 aa, Severe acute respiratory syndrome-related coronavirus
  REGION 1..12: note = Table B: HLA-DQA1*01:02-B1*06:02L HLA-DRB1*14:01L HLA-DQA1*05:01-B1*02:01L
  source 1..12: note = Severe acute respiratory syndrome coronavirus 2
GTAVMSLKEGQI

SEQ ID NO: 18669 - protein, 12 aa, Severe acute respiratory syndrome-related coronavirus
  REGION 1..12: note = Table B: HLA-DQA1*01:02-B1*06:02L HLA-DPA1*03:01-B1*105:01L
  source 1..12: note = Severe acute respiratory syndrome coronavirus 2
LKEGQINDMILS

SEQ ID NO: 18670 - protein, 12 aa, Severe acute respiratory syndrome-related coronavirus
  REGION 1..12: note = Table B: HLA-DQA1*01:02-B1*06:02L HLA-DPA1*03:01-B1*105:01L HLA-DQA1*03:01-B1*03:02L HLA-DQA1*05:05-B1*03:01L HLA-DQA1*01:03-B1*06:01L HLA-DQA1*02:01-B1*03:03L
  source 1..12: note = Severe acute respiratory syndrome coronavirus 2
INDMILSLLSKG

SEQ ID NO: 18671 - protein, 11 aa, Severe acute respiratory syndrome-related coronavirus
  REGION 1..11: note = Table B: HLA-DQA1*01:02-B1*06:02L HLA-DQA1*01:03-B1*06:01L HLA-DQA1*02:01-B1*03:03L
  source 1..11: note = Severe acute respiratory syndrome coronavirus 2
DMILSLLSKGR

SEQ ID NO: 18672 - protein, 12 aa, Severe acute respiratory syndrome-related coronavirus
  REGION 1..12: note = Table B: HLA-DQA1*01:02-B1*06:02L HLA-DRB1*01:02L HLA-DPA1*03:01-B1*105:01L HLA-DRB1*16:01L
  source 1..12: note = Severe acute respiratory syndrome coronavirus 2
MILSLLSKGRLI

SEQ ID NO: 18673 - protein, 13 aa, Severe acute respiratory syndrome-related coronavirus
  REGION 1..13: note = Table B: HLA-DQA1*01:02-B1*06:02L
  source 1..13: note = Severe acute respiratory syndrome coronavirus 2
LLSKGRLIIRENN

SEQ ID NO: 18674 - protein, 12 aa, Severe acute respiratory syndrome-related coronavirus
  REGION 1..12: note = Table B: HLA-DQA1*01:02-B1*06:02L HLA-DQA1*05:01-B1*02:01L HLA-DQA1*01:03-B1*06:01L HLA-DQA1*02:01-B1*03:03L
  source 1..12: note = Severe acute respiratory syndrome coronavirus 2
ENNRVVISSDVL

SEQ ID NO: 18675 - protein, 13 aa, Severe acute respiratory syndrome-related coronavirus
  REGION 1..13: note = Table B: HLA-DQA1*01:02-B1*06:02L HLA-DPA1*03:01-B1*04:02L HLA-DPA1*01:03-B1*04:02L
  source 1..13: note = Severe acute respiratory syndrome coronavirus 2
FVFLVLLPLVSSQ

SEQ ID NO: 18676 - protein, 12 aa, Severe acute respiratory syndrome-related coronavirus
  REGION 1..12: note = Table B: HLA-DQA1*01:02-B1*06:02L HLA-DPA1*03:01-B1*105:01L
  source 1..12: note = Severe acute respiratory syndrome coronavirus 2
LPLVSSQCVNLT

SEQ ID NO: 18677 - protein, 11 aa, Severe acute respiratory syndrome-related coronavirus
  REGION 1..11: note = Table B: HLA-DQA1*01:02-B1*06:02L HLA-DQA1*01:03-B1*06:01L HLA-DQA1*02:01-B1*03:03L
  source 1..11: note = Severe acute respiratory syndrome coronavirus 2
VSSQCVNLTTR

SEQ ID NO: 18678 - protein, 12 aa, Severe acute respiratory syndrome-related coronavirus
  REGION 1..12: note = Table B: HLA-DQA1*01:02-B1*06:02L HLA-DQA1*01:03-B1*06:01L
  source 1..12: note = Severe acute respiratory syndrome coronavirus 2
SSQCVNLTTRTQ

SEQ ID NO: 18679 - protein, 10 aa, Severe acute respiratory syndrome-related coronavirus
  REGION 1..10: note = Table B: HLA-DQA1*01:02-B1*06:02L HLA-DPA1*02:01-B1*13:01L HLA-DPA1*03:01-B1*105:01L HLA-DQA1*01:03-B1*06:01L HLA-DQA1*02:01-B1*03:03L
  source 1..10: note = Severe acute respiratory syndrome coronavirus 2
QLPPAYTNSF

SEQ ID NO: 18680 - protein, 10 aa, Severe acute respiratory syndrome-related coronavirus
  REGION 1..10: note = Table B: HLA-DQA1*01:02-B1*06:02L HLA-DPA1*03:01-B1*105:01L HLA-DQA1*01:03-B1*06:01L HLA-DQA1*02:01-B1*03:03L
  source 1..10: note = Severe acute respiratory syndrome coronavirus 2
FRSSVLHSTQ

SEQ ID NO: 18681 - protein, 10 aa, Severe acute respiratory syndrome-related coronavirus
  REGION 1..10: note = Table B: HLA-DQA1*01:02-B1*06:02L HLA-DQA1*03:01-B1*03:02L HLA-DQA1*01:03-B1*06:01L HLA-DQA1*02:01-B1*03:03L
  source 1..10: note = Severe acute respiratory syndrome coronavirus 2
RSSVLHSTQD

SEQ ID NO: 18682 - protein, 10 aa, Severe acute respiratory syndrome-related coronavirus
  REGION 1..10: note = Table B: HLA-DQA1*01:02-B1*06:02L HLA-DQA1*01:03-B1*06:01L
  source 1..10: note = Severe acute respiratory syndrome coronavirus 2
HSTQDLFLPF

SEQ ID NO: 18683 - protein, 11 aa, Severe acute respiratory syndrome-related coronavirus
  REGION 1..11: note = Table B: HLA-DQA1*01:02-B1*06:02L HLA-DPA1*03:01-B1*04:02L HLA-DPA1*03:01-B1*105:01L HLA-DQA1*01:03-B1*06:01L HLA-DQA1*02:01-B1*03:03L
  source 1..11: note = Severe acute respiratory syndrome coronavirus 2
FSNVTWFHAIH

SEQ ID NO: 18684 - protein, 12 aa, Severe acute respiratory syndrome-related coronavirus
  REGION 1..12: note = Table B: HLA-DQA1*01:02-B1*06:02L HLA-DPA1*03:01-B1*04:02L
  source 1..12: note = Severe acute respiratory syndrome coronavirus 2
VTWFHAIHVSGT

SEQ ID NO: 18685 - protein, 10 aa, Severe acute respiratory syndrome-related coronavirus
  REGION 1..10: note = Table B: HLA-DQA1*01:02-B1*06:02L HLA-DQA1*02:01-B1*03:03L
  source 1..10: note = Severe acute respiratory syndrome coronavirus 2
FHAIHVSGTN

SEQ ID NO: 18686 - protein, 14 aa, Severe acute respiratory syndrome-related coronavirus
  REGION 1..14: note = Table B: HLA-DQA1*01:02-B1*06:02L HLA-DQA1*03:01-B1*03:02L
  source 1..14: note = Severe acute respiratory syndrome coronavirus 2
VSGTNGTKRFDNPV

SEQ ID NO: 18687 - protein, 12 aa, Severe acute respiratory syndrome-related coronavirus
  REGION 1..12: note = Table B: HLA-DQA1*01:02-B1*06:02L
  source 1..12: note = Severe acute respiratory syndrome coronavirus 2
FNDGVYFASTEK

SEQ ID NO: 18688 - protein, 12 aa, Severe acute respiratory syndrome-related coronavirus
  REGION 1..12: note = Table B: HLA-DQA1*01:02-B1*06:02L
  source 1..12: note = Severe acute respiratory syndrome coronavirus 2
EKSNIIRGWIFG

SEQ ID NO: 18689 - protein, 11 aa, Severe acute respiratory syndrome-related coronavirus
  REGION 1..11: note = Table B: HLA-DQA1*01:02-B1*06:02L HLA-DPA1*03:01-B1*04:02L HLA-DPA1*03:01-B1*105:01L HLA-DQA1*02:01-B1*03:03L
  source 1..11: note = Severe acute respiratory syndrome coronavirus 2
NIIRGWIFGTT

SEQ ID NO: 18690 - protein, 12 aa, Severe acute respiratory syndrome-related coronavirus
  REGION 1..12: note = Table B: HLA-DQA1*01:02-B1*06:02L
  source 1..12: note = Severe acute respiratory syndrome coronavirus 2
LDSKTQSLLIVN

SEQ ID NO: 18691 - protein, 13 aa, Severe acute respiratory syndrome-related coronavirus
  REGION 1..13: note = Table B: HLA-DQA1*01:02-B1*06:02L
  source 1..13: note = Severe acute respiratory syndrome coronavirus 2
SKTQSLLIVNNAT

SEQ ID NO: 18692 - protein, 12 aa, Severe acute respiratory syndrome-related coronavirus
  REGION 1..12: note = Table B: HLA-DQA1*01:02-B1*06:02L HLA-DRB1*08:04L HLA-DPA1*01:03-B1*03:01L HLA-DPA1*03:01-B1*04:02L HLA-DRB1*11:03L HLA-DRB1*11:04L HLA-DRB1*14:02L HLA-DQA1*05:05-B1*03:01L HLA-DRB1*10:01L HLA-DRB1*04:08L
  source 1..12: note = Severe acute respiratory syndrome coronavirus 2
SLLIVNNATNVV

SEQ ID NO: 18693 - protein, 11 aa, Severe acute respiratory syndrome-related coronavirus
  REGION 1..11: note = Table B: HLA-DQA1*01:02-B1*06:02L
  source 1..11: note = Severe acute respiratory syndrome coronavirus 2
NATNVVIKVCE

SEQ ID NO: 18694 - protein, 11 aa, Severe acute respiratory syndrome-related coronavirus
  REGION 1..11: note = Table B: HLA-DQA1*01:02-B1*06:02L HLA-DQA1*05:05-B1*03:19L
  source 1..11: note = Severe acute respiratory syndrome coronavirus 2
ATNVVIKVCEF

SEQ ID NO: 18695 - protein, 10 aa, Severe acute respiratory syndrome-related coronavirus
  REGION 1..10: note = Table B: HLA-DQA1*01:02-B1*06:02L HLA-DRB1*12:01L HLA-DQA1*01:03-B1*06:01L HLA-DRB1*15:03L
  source 1..10: note = Severe acute respiratory syndrome coronavirus 2
VVIKVCEFQF

SEQ ID NO: 18696 - protein, 13 aa, Severe acute respiratory syndrome-related coronavirus
  REGION 1..13: note = Table B: HLA-DQA1*01:02-B1*06:02L HLA-DPA1*01:03-B1*04:02L HLA-DPA1*01:02-B1*04:01L
  source 1..13: note = Severe acute respiratory syndrome coronavirus 2
VIKVCEFQFCNDP

SEQ ID NO: 18697 - protein, 13 aa, Severe acute respiratory syndrome-related coronavirus
  REGION 1..13: note = Table B: HLA-DQA1*01:02-B1*06:02L HLA-DPA1*01:03-B1*04:02L HLA-DPA1*01:02-B1*04:01L HLA-DQA1*01:03-B1*06:01L
  source 1..13: note = Severe acute respiratory syndrome coronavirus 2
IKVCEFQFCNDPF

SEQ ID NO: 18698 - protein, 10 aa, Severe acute respiratory syndrome-related coronavirus
  REGION 1..10: note = Table B: HLA-DQA1*01:02-B1*06:02L HLA-DPA1*01:03-B1*03:01L HLA-DPA1*03:01-B1*04:02L HLA-DRB1*03:01L HLA-DRB1*11:02L HLA-DRB1*14:02L HLA-DQA1*01-B1*05L HLA-DQA1*05:05-B1*03:19L HLA-DQA1*05:01-B1*02:01L HLA-DRB4*01:01L
  REGION 1..10: note = CONT. FROM ABOVE: HLA-DPA1*01:03-B1*04:01L HLA-DPA1*01:03-B1*04: 02L HLA-DPA1*03:01-B1*105:01L HLA-DPA1*01:03-B1*104:01L HLA-DRB1 *16:01L HLA-DRB1*15:03L
  source 1..10: note = Severe acute respiratory syndrome coronavirus 2
FCNDPFLGVY

SEQ ID NO: 18699 - protein, 12 aa, Severe acute respiratory syndrome-related coronavirus
  REGION 1..12: note = Table B: HLA-DQA1*01:02-B1*06:02L HLA-DRB1*16:01L
  source 1..12: note = Severe acute respiratory syndrome coronavirus 2
KNNKSWMESEFR

SEQ ID NO: 18700 - protein, 12 aa, Severe acute respiratory syndrome-related coronavirus
  REGION 1..12: note = Table B: HLA-DQA1*01:02-B1*06:02L
  source 1..12: note = Severe acute respiratory syndrome coronavirus 2
MESEFRVYSSAN

SEQ ID NO: 18701 - protein, 10 aa, Severe acute respiratory syndrome-related coronavirus
  REGION 1..10: note = Table B: HLA-DQA1*01:02-B1*06:02L HLA-DQA1*05:05-B1*03:19L HLA-DQA1*05:01-B1*02:01L
  source 1..10: note = Severe acute respiratory syndrome coronavirus 2
SSANNCTFEY

SEQ ID NO: 18702 - protein, 13 aa, Severe acute respiratory syndrome-related coronavirus
  REGION 1..13: note = Table B: HLA-DQA1*01:02-B1*06:02L
  source 1..13: note = Severe acute respiratory syndrome coronavirus 2
ANNCTFEYVSQPF

SEQ ID NO: 18703 - protein, 11 aa, Severe acute respiratory syndrome-related coronavirus
  REGION 1..11: note = Table B: HLA-DQA1*01:02-B1*06:02L HLA-DPA1*01:03-B1*04:02L HLA-DRB1*12:01L HLA-DRB1*16:01L HLA-DRB1*04:08L
  source 1..11: note = Severe acute respiratory syndrome coronavirus 2
FEYVSQPFLMD

SEQ ID NO: 18704 - protein, 13 aa, Severe acute respiratory syndrome-related coronavirus
  REGION 1..13: note = Table B: HLA-DQA1*01:02-B1*06:02L HLA-DRB1*01:02L HLA-DQA1*01:01-B1*05:01L HLA-DPA1*02:01-B1*13:01L
  source 1..13: note = Severe acute respiratory syndrome coronavirus 2
VSQPFLMDLEGKQ

SEQ ID NO: 18705 - protein, 13 aa, Severe acute respiratory syndrome-related coronavirus
  REGION 1..13: note = Table B: HLA-DQA1*01:02-B1*06:02L HLA-DRB1*15:03L
  source 1..13: note = Severe acute respiratory syndrome coronavirus 2
QPFLMDLEGKQGN

SEQ ID NO: 18706 - protein, 13 aa, Severe acute respiratory syndrome-related coronavirus
  REGION 1..13: note = Table B: HLA-DQA1*01:02-B1*06:02L HLA-DPA1*03:01-B1*105:01L
  source 1..13: note = Severe acute respiratory syndrome coronavirus 2
PFLMDLEGKQGNF

SEQ ID NO: 18707 - protein, 12 aa, Severe acute respiratory syndrome-related coronavirus
  REGION 1..12: note = Table B: HLA-DQA1*01:02-B1*06:02L HLA-DRB1*01:02L HLA-DQA1*02:01-B1*03:03L
  source 1..12: note = Severe acute respiratory syndrome coronavirus 2
LMDLEGKQGNFK

SEQ ID NO: 18708 - protein, 15 aa, Severe acute respiratory syndrome-related coronavirus
  REGION 1..15: note = Table B: HLA-DQA1*01:02-B1*06:02L
  source 1..15: note = Severe acute respiratory syndrome coronavirus 2
DLEGKQGNFKNLREF

SEQ ID NO: 18709 - protein, 13 aa, Severe acute respiratory syndrome-related coronavirus
  REGION 1..13: note = Table B: HLA-DQA1*01:02-B1*06:02L HLA-DPA1*03:01-B1*04:02L HLA-DPA1*03:01-B1*105:01L HLA-DRB1*16:01L
  source 1..13: note = Severe acute respiratory syndrome coronavirus 2
FKNLREFVFKNID

SEQ ID NO: 18710 - protein, 12 aa, Severe acute respiratory syndrome-related coronavirus
  REGION 1..12: note = Table B: HLA-DQA1*01:02-B1*06:02L HLA-DRB1*08:01L HLA-DPA1*01:02-B1*04:01L HLA-DRB1*16:01L HLA-DRB1*04:08L HLA-DQA1*02:01-B1*03:03L
  source 1..12: note = Severe acute respiratory syndrome coronavirus 2
NLREFVFKNIDG

SEQ ID NO: 18711 - protein, 14 aa, Severe acute respiratory syndrome-related coronavirus
  REGION 1..14: note = Table B: HLA-DQA1*01:02-B1*06:02L
  source 1..14: note = Severe acute respiratory syndrome coronavirus 2
YSKHTPINLVRDLP

SEQ ID NO: 18712 - protein, 12 aa, Severe acute respiratory syndrome-related coronavirus
  REGION 1..12: note = Table B: HLA-DQA1*01:02-B1*06:02L HLA-DRB1*01:02L HLA-DRB1*08:01L
  source 1..12: note = Severe acute respiratory syndrome coronavirus 2
HTPINLVRDLPQ

SEQ ID NO: 18713 - protein, 14 aa, Severe acute respiratory syndrome-related coronavirus
  REGION 1..14: note = Table B: HLA-DQA1*01:02-B1*06:02L
  source 1..14: note = Severe acute respiratory syndrome coronavirus 2
LVRDLPQGFSALEP

SEQ ID NO: 18714 - protein, 14 aa, Severe acute respiratory syndrome-related coronavirus
  REGION 1..14: note = Table B: HLA-DQA1*01:02-B1*06:02L HLA-DQA1*05:01-B1*02:01L HLA-DQA1*01:03-B1*06:01L HLA-DQA1*02:01-B1*03:03L
  source 1..14: note = Severe acute respiratory syndrome coronavirus 2
VRDLPQGFSALEPL

SEQ ID NO: 18715 - protein, 12 aa, Severe acute respiratory syndrome-related coronavirus
  REGION 1..12: note = Table B: HLA-DQA1*01:02-B1*06:02L HLA-DRB1*01:02L HLA-DPA1*01:03-B1*03:01L HLA-DPA1*03:01-B1*04:02L HLA-DQA1*05:05-B1*03:19L HLA-DPA1*02:01-B1*13:01L HLA-DQA1*05:05-B1*03:01L
  source 1..12: note = Severe acute respiratory syndrome coronavirus 2
LEPLVDLPIGIN

SEQ ID NO: 18716 - protein, 13 aa, Severe acute respiratory syndrome-related coronavirus
  REGION 1..13: note = Table B: HLA-DQA1*01:02-B1*06:02L HLA-DPA1*03:01-B1*105:01L HLA-DQA1*05:05-B1*03:01L HLA-DRB1*15:03L
  source 1..13: note = Severe acute respiratory syndrome coronavirus 2
EPLVDLPIGINIT

SEQ ID NO: 18717 - protein, 10 aa, Severe acute respiratory syndrome-related coronavirus
  REGION 1..10: note = Table B: HLA-DQA1*01:02-B1*06:02L HLA-DQA1*05:05-B1*03:19L
  source 1..10: note = Severe acute respiratory syndrome coronavirus 2
AGAAAYYVGY

SEQ ID NO: 18718 - protein, 12 aa, Severe acute respiratory syndrome-related coronavirus
  REGION 1..12: note = Table B: HLA-DQA1*01:02-B1*06:02L HLA-DRB1*01:02L HLA-DQA1*01-B1*05L HLA-DQA1*05:01-B1*02:01L HLA-DPA1*03:01-B1*105:01L
  source 1..12: note = Severe acute respiratory syndrome coronavirus 2
FLLKYNENGTIT

SEQ ID NO: 18719 - protein, 11 aa, Severe acute respiratory syndrome-related coronavirus
  REGION 1..11: note = Table B: HLA-DQA1*01:02-B1*06:02L HLA-DQA1*05:01-B1*02:01L HLA-DQA1*01:03-B1*06:01L HLA-DQA1*02:01-B1*03:03L
  source 1..11: note = Severe acute respiratory syndrome coronavirus 2
NENGTITDAVD

SEQ ID NO: 18720 - protein, 14 aa, Severe acute respiratory syndrome-related coronavirus
  REGION 1..14: note = Table B: HLA-DQA1*01:02-B1*06:02L HLA-DRB1*01:02L HLA-DPA1*03:01-B1*105:01L HLA-DQA1*01:03-B1*06:01L HLA-DRB1*15:03L
  source 1..14: note = Severe acute respiratory syndrome coronavirus 2
DPLSETKCTLKSFT

SEQ ID NO: 18721 - protein, 15 aa, Severe acute respiratory syndrome-related coronavirus
  REGION 1..15: note = Table B: HLA-DQA1*01:02-B1*06:02L
  source 1..15: note = Severe acute respiratory syndrome coronavirus 2
PLSETKCTLKSFTVE

SEQ ID NO: 18722 - protein, 15 aa, Severe acute respiratory syndrome-related coronavirus
  REGION 1..15: note = Table B: HLA-DQA1*01:02-B1*06:02L
  source 1..15: note = Severe acute respiratory syndrome coronavirus 2
SETKCTLKSFTVEKG

SEQ ID NO: 18723 - protein, 11 aa, Severe acute respiratory syndrome-related coronavirus
  REGION 1..11: note = Table B: HLA-DQA1*01:02-B1*06:02L HLA-DQA1*05:05-B1*03:19L HLA-DQA1*02:01-B1*03:03L
  source 1..11: note = Severe acute respiratory syndrome coronavirus 2
VEKGIYQTSNF

SEQ ID NO: 18724 - protein, 11 aa, Severe acute respiratory syndrome-related coronavirus
  REGION 1..11: note = Table B: HLA-DQA1*01:02-B1*06:02L HLA-DPA1*03:01-B1*04:02L HLA-DQA1*05:01-B1*02:01L HLA-DPA1*01:03-B1*04:01L HLA-DPA1*01:03-B1*04:02L HLA-DRB1*04:08L
  source 1..11: note = Severe acute respiratory syndrome coronavirus 2
YQTSNFRVQPT

SEQ ID NO: 18725 - protein, 12 aa, Severe acute respiratory syndrome-related coronavirus
  REGION 1..12: note = Table B: HLA-DQA1*01:02-B1*06:02L
  source 1..12: note = Severe acute respiratory syndrome coronavirus 2
QTSNFRVQPTES

SEQ ID NO: 18726 - protein, 13 aa, Severe acute respiratory syndrome-related coronavirus
  REGION 1..13: note = Table B: HLA-DQA1*01:02-B1*06:02L HLA-DRB1*08:77L HLA-DPA1*01:03-B1*03:01L HLA-DRB1*11:03L HLA-DRB1*11:04L HLA-DRB1*14:02L HLA-DRB1*08:01L HLA-DQA1*05:05-B1*03:19L HLA-DPA1*01:03-B1*04:01L HLA-DRB1*04:10L HLA-DRB1*09:01L
  REGION 1..13: note = CONT. FROM ABOVE: HLA-DPA1*01:03-B1*04:02L HLA-DRB3*01:01L HLA-D QA1*05:05-B1*03:01L HLA-DRB1*07:01L HLA-DRB1*10:01L HLA-DRB1*08: 03L
  source 1..13: note = Severe acute respiratory syndrome coronavirus 2
TSNFRVQPTESIV

SEQ ID NO: 18727 - protein, 12 aa, Severe acute respiratory syndrome-related coronavirus
  REGION 1..12: note = Table B: HLA-DQA1*01:02-B1*06:02L HLA-DQA1*05:01-B1*02:01L HLA-DPA1*03:01-B1*105:01L
  source 1..12: note = Severe acute respiratory syndrome coronavirus 2
PTESIVRFPNIT

SEQ ID NO: 18728 - protein, 12 aa, Severe acute respiratory syndrome-related coronavirus
  REGION 1..12: note = Table B: HLA-DQA1*01:02-B1*06:02L HLA-DQA1*01-B1*05L HLA-DQA1*05:01-B1*02:01L HLA-DPA1*03:01-B1*105:01L HLA-DQA1*03:01-B1*03:02L HLA-DQA1*01:03-B1*06:01L HLA-DQA1*02:01-B1*03:03L HLA-DRB1*15:03L
  source 1..12: note = Severe acute respiratory syndrome coronavirus 2
ITNLCPFGEVFN

SEQ ID NO: 18729 - protein, 12 aa, Severe acute respiratory syndrome-related coronavirus
  REGION 1..12: note = Table B: HLA-DQA1*01:02-B1*06:02L
  source 1..12: note = Severe acute respiratory syndrome coronavirus 2
LCPFGEVFNATR

SEQ ID NO: 18730 - protein, 10 aa, Severe acute respiratory syndrome-related coronavirus
  REGION 1..10: note = Table B: HLA-DQA1*01:02-B1*06:02L HLA-DQA1*02:01-B1*03:03L
  source 1..10: note = Severe acute respiratory syndrome coronavirus 2
ATRFASVYAW

SEQ ID NO: 18731 - protein, 13 aa, Severe acute respiratory syndrome-related coronavirus
  REGION 1..13: note = Table B: HLA-DQA1*01:02-B1*06:02L HLA-DRB1*08:04L
  source 1..13: note = Severe acute respiratory syndrome coronavirus 2
FASVYAWNRKRIS

SEQ ID NO: 18732 - protein, 12 aa, Severe acute respiratory syndrome-related coronavirus
  REGION 1..12: note = Table B: HLA-DQA1*01:02-B1*06:02L HLA-DPA1*03:01-B1*105:01L HLA-DQA1*05:05-B1*03:01L
  source 1..12: note = Severe acute respiratory syndrome coronavirus 2
RISNCVADYSVL

SEQ ID NO: 18733 - protein, 12 aa, Severe acute respiratory syndrome-related coronavirus
  REGION 1..12: note = Table B: HLA-DQA1*01:02-B1*06:02L HLA-DQA1*05:05-B1*03:19L HLA-DPA1*03:01-B1*105:01L
  source 1..12: note = Severe acute respiratory syndrome coronavirus 2
ISNCVADYSVLY

SEQ ID NO: 18734 - protein, 10 aa, Severe acute respiratory syndrome-related coronavirus
  REGION 1..10: note = Table B: HLA-DQA1*01:02-B1*06:02L HLA-DQA1*01:03-B1*06:01L
  source 1..10: note = Severe acute respiratory syndrome coronavirus 2
YSVLYNSASF

SEQ ID NO: 18735 - protein, 14 aa, Severe acute respiratory syndrome-related coronavirus
  REGION 1..14: note = Table B: HLA-DQA1*01:02-B1*06:02L HLA-DRB1*01:02L HLA-DRB1*12:01L HLA-DPA1*03:01-B1*105:01L HLA-DRB1*16:01L
  source 1..14: note = Severe acute respiratory syndrome coronavirus 2
SASFSTFKCYGVSP

SEQ ID NO: 18736 - protein, 11 aa, Severe acute respiratory syndrome-related coronavirus
  REGION 1..11: note = Table B: HLA-DQA1*01:02-B1*06:02L HLA-DQA1*05:05-B1*03:19L HLA-DQA1*02:01-B1*03:03L
  source 1..11: note = Severe acute respiratory syndrome coronavirus 2
KLNDLCFTNVY

SEQ ID NO: 18737 - protein, 13 aa, Severe acute respiratory syndrome-related coronavirus
  REGION 1..13: note = Table B: HLA-DQA1*01:02-B1*06:02L
  source 1..13: note = Severe acute respiratory syndrome coronavirus 2
LNDLCFTNVYADS

SEQ ID NO: 18738 - protein, 12 aa, Severe acute respiratory syndrome-related coronavirus
  REGION 1..12: note = Table B: HLA-DQA1*01:02-B1*06:02L HLA-DRB1*15:03L
  source 1..12: note = Severe acute respiratory syndrome coronavirus 2
FTNVYADSFVIR

SEQ ID NO: 18739 - protein, 10 aa, Severe acute respiratory syndrome-related coronavirus
  REGION 1..10: note = Table B: HLA-DQA1*01:02-B1*06:02L HLA-DQA1*05:05-B1*03:19L HLA-DQA1*05:01-B1*02:01L HLA-DQA1*02:01-B1*03:03L
  source 1..10: note = Severe acute respiratory syndrome coronavirus 2
PGQTGKIADY

SEQ ID NO: 18740 - protein, 13 aa, Severe acute respiratory syndrome-related coronavirus
  REGION 1..13: note = Table B: HLA-DQA1*01:02-B1*06:02L HLA-DQA1*05:05-B1*03:19L HLA-DPA1*03:01-B1*105:01L HLA-DQA1*05:05-B1*03:01L HLA-DQA1*01:03-B1*06:01L
  source 1..13: note = Severe acute respiratory syndrome coronavirus 2
LPDDFTGCVIAWN

SEQ ID NO: 18741 - protein, 11 aa, Severe acute respiratory syndrome-related coronavirus
  REGION 1..11: note = Table B: HLA-DQA1*01:02-B1*06:02L HLA-DQA1*05:05-B1*03:01L
  source 1..11: note = Severe acute respiratory syndrome coronavirus 2
FTGCVIAWNSN

SEQ ID NO: 18742 - protein, 11 aa, Severe acute respiratory syndrome-related coronavirus
  REGION 1..11: note = Table B: HLA-DQA1*01:02-B1*06:02L
  source 1..11: note = Severe acute respiratory syndrome coronavirus 2
TGCVIAWNSNN

SEQ ID NO: 18743 - protein, 10 aa, Severe acute respiratory syndrome-related coronavirus
  REGION 1..10: note = Table B: HLA-DQA1*01:02-B1*06:02L HLA-DPA1*01:03-B1*03:01L HLA-DRB1*03:01L HLA-DQA1*05:05-B1*03:19L HLA-DQA1*05:01-B1*02:01L HLA-DPA1*01:03-B1*104:01L HLA-DRB1*16:01L HLA-DQA1*02:01-B1*03:03L
  source 1..10: note = Severe acute respiratory syndrome coronavirus 2
KVGGNYNYLY

SEQ ID NO: 18744 - protein, 10 aa, Severe acute respiratory syndrome-related coronavirus
  REGION 1..10: note = Table B: HLA-DQA1*01:02-B1*06:02L HLA-DQA1*01:03-B1*06:01L
  source 1..10: note = Severe acute respiratory syndrome coronavirus 2
GNYNYLYRLF

SEQ ID NO: 18745 - protein, 12 aa, Severe acute respiratory syndrome-related coronavirus
  REGION 1..12: note = Table B: HLA-DQA1*01:02-B1*06:02L HLA-DRB1*01:02L HLA-DPA1*03:01-B1*04:02L HLA-DRB1*14:01L HLA-DRB1*11:04L HLA-DRB1*11:01L HLA-DRB1*12:01L HLA-DRB3*01:01L HLA-DPA1*03:01-B1*105:01L HLA-DRB1*15:03L
  source 1..12: note = Severe acute respiratory syndrome coronavirus 2
YNYLYRLFRKSN

SEQ ID NO: 18746 - protein, 11 aa, Severe acute respiratory syndrome-related coronavirus
  REGION 1..11: note = Table B: HLA-DQA1*01:02-B1*06:02L HLA-DRB1*11:02L HLA-DRB1*14:02L HLA-DQA1*02:01-B1*03:03L
  source 1..11: note = Severe acute respiratory syndrome coronavirus 2
PFERDISTEIY

SEQ ID NO: 18747 - protein, 12 aa, Severe acute respiratory syndrome-related coronavirus
  REGION 1..12: note = Table B: HLA-DQA1*01:02-B1*06:02L
  source 1..12: note = Severe acute respiratory syndrome coronavirus 2
RDISTEIYQAGS

SEQ ID NO: 18748 - protein, 12 aa, Severe acute respiratory syndrome-related coronavirus
  REGION 1..12: note = Table B: HLA-DQA1*01:02-B1*06:02L HLA-DQA1*01:03-B1*06:01L
  source 1..12: note = Severe acute respiratory syndrome coronavirus 2
GSTPCNGVEGFN

SEQ ID NO: 18749 - protein, 14 aa, Severe acute respiratory syndrome-related coronavirus
  REGION 1..14: note = Table B: HLA-DQA1*01:02-B1*06:02L
  source 1..14: note = Severe acute respiratory syndrome coronavirus 2
NGVEGFNCYFPLQS

SEQ ID NO: 18750 - protein, 12 aa, Severe acute respiratory syndrome-related coronavirus
  REGION 1..12: note = Table B: HLA-DQA1*01:02-B1*06:02L HLA-DPA1*03:01-B1*105:01L
  source 1..12: note = Severe acute respiratory syndrome coronavirus 2
GFNCYFPLQSYG

SEQ ID NO: 18751 - protein, 10 aa, Severe acute respiratory syndrome-related coronavirus
  REGION 1..10: note = Table B: HLA-DQA1*01:02-B1*06:02L HLA-DQA1*05:05-B1*03:19L HLA-DQA1*05:01-B1*02:01L
  source 1..10: note = Severe acute respiratory syndrome coronavirus 2
PTNGVGYQPY

SEQ ID NO: 18752 - protein, 12 aa, Severe acute respiratory syndrome-related coronavirus
  REGION 1..12: note = Table B: HLA-DQA1*01:02-B1*06:02L HLA-DPA1*03:01-B1*04:02L HLA-DPA1*03:01-B1*105:01L HLA-DRB1*15:03L
  source 1..12: note = Severe acute respiratory syndrome coronavirus 2
VVVLSFELLHAP

SEQ ID NO: 18753 - protein, 12 aa, Severe acute respiratory syndrome-related coronavirus
  REGION 1..12: note = Table B: HLA-DQA1*01:02-B1*06:02L
  source 1..12: note = Severe acute respiratory syndrome coronavirus 2
PATVCGPKKSTN

SEQ ID NO: 18754 - protein, 15 aa, Severe acute respiratory syndrome-related coronavirus
  REGION 1..15: note = Table B: HLA-DQA1*01:02-B1*06:02L HLA-DQA1*01:03-B1*06:01L
  source 1..15: note = Severe acute respiratory syndrome coronavirus 2
GPKKSTNLVKNKCVN

SEQ ID NO: 18755 - protein, 13 aa, Severe acute respiratory syndrome-related coronavirus
  REGION 1..13: note = Table B: HLA-DQA1*01:02-B1*06:02L HLA-DRB1*15:03L
  source 1..13: note = Severe acute respiratory syndrome coronavirus 2
NLVKNKCVNFNFN

SEQ ID NO: 18756 - protein, 13 aa, Severe acute respiratory syndrome-related coronavirus
  REGION 1..13: note = Table B: HLA-DQA1*01:02-B1*06:02L
  source 1..13: note = Severe acute respiratory syndrome coronavirus 2
LVKNKCVNFNFNG

SEQ ID NO: 18757 - protein, 14 aa, Severe acute respiratory syndrome-related coronavirus
  REGION 1..14: note = Table B: HLA-DQA1*01:02-B1*06:02L
  source 1..14: note = Severe acute respiratory syndrome coronavirus 2
VKNKCVNFNFNGLT

SEQ ID NO: 18758 - protein, 11 aa, Severe acute respiratory syndrome-related coronavirus
  REGION 1..11: note = Table B: HLA-DQA1*01:02-B1*06:02L HLA-DQA1*05:05-B1*03:01L
  source 1..11: note = Severe acute respiratory syndrome coronavirus 2
LTGTGVLTESN

SEQ ID NO: 18759 - protein, 13 aa, Severe acute respiratory syndrome-related coronavirus
  REGION 1..13: note = Table B: HLA-DQA1*01:02-B1*06:02L HLA-DRB1*01:02L HLA-DRB1*08:04L HLA-DPA1*03:01-B1*04:02L HLA-DRB1*08:01L HLA-DRB1*12:01L HLA-DPA1*03:01-B1*105:01L HLA-DPA1*01:02-B1*04:01L HLA-DRB1*16:01L
  REGION 1..13: note = CONT. FROM ABOVE: HLA-DQA1*01:03-B1*06:01L HLA-DRB1*15:03L
  source 1..13: note = Severe acute respiratory syndrome coronavirus 2
VLTESNKKFLPFQ

SEQ ID NO: 18760 - protein, 12 aa, Severe acute respiratory syndrome-related coronavirus
  REGION 1..12: note = Table B: HLA-DQA1*01:02-B1*06:02L HLA-DPA1*03:01-B1*04:02L HLA-DPA1*02:01-B1*13:01L HLA-DPA1*03:01-B1*105:01L HLA-DQA1*03:01-B1*03:02L HLA-DPA1*01:02-B1*04:01L HLA-DRB1*16:01L HLA-DQA1*01:03-B1*06:01L
  REGION 1..12: note = CONT. FROM ABOVE: HLA-DQA1*02:01-B1*03:03L
  source 1..12: note = Severe acute respiratory syndrome coronavirus 2
SNKKFLPFQQFG

SEQ ID NO: 18761 - protein, 12 aa, Severe acute respiratory syndrome-related coronavirus
  REGION 1..12: note = Table B: HLA-DQA1*01:02-B1*06:02L HLA-DRB1*01:02L HLA-DPA1*03:01-B1*04:02L HLA-DRB1*14:01L HLA-DRB1*12:01L HLA-DPA1*03:01-B1*105:01L HLA-DRB1*16:01L HLA-DRB1*15:03L
  source 1..12: note = Severe acute respiratory syndrome coronavirus 2
FLPFQQFGRDIA

SEQ ID NO: 18762 - protein, 11 aa, Severe acute respiratory syndrome-related coronavirus
  REGION 1..11: note = Table B: HLA-DQA1*01:02-B1*06:02L HLA-DRB3*02:01L HLA-DPA1*01:03-B1*03:01L HLA-DRB4*01:01L HLA-DPA1*03:01-B1*105:01L HLA-DRB1*15:03L
  source 1..11: note = Severe acute respiratory syndrome coronavirus 2
TTDAVRDPQTL

SEQ ID NO: 18763 - protein, 14 aa, Severe acute respiratory syndrome-related coronavirus
  REGION 1..14: note = Table B: HLA-DQA1*01:02-B1*06:02L HLA-DPA1*02:01-B1*13:01L HLA-DPA1*03:01-B1*105:01L HLA-DQA1*02:01-B1*03:03L
  source 1..14: note = Severe acute respiratory syndrome coronavirus 2
VRDPQTLEILDITP

SEQ ID NO: 18764 - protein, 12 aa, Severe acute respiratory syndrome-related coronavirus
  REGION 1..12: note = Table B: HLA-DQA1*01:02-B1*06:02L HLA-DPA1*03:01-B1*105:01L
  source 1..12: note = Severe acute respiratory syndrome coronavirus 2
LDITPCSFGGVS

SEQ ID NO: 18765 - protein, 14 aa, Severe acute respiratory syndrome-related coronavirus
  REGION 1..14: note = Table B: HLA-DQA1*01:02-B1*06:02L HLA-DQA1*05:01-B1*02:01L
  source 1..14: note = Severe acute respiratory syndrome coronavirus 2
GVSVITPGTNTSNQ

SEQ ID NO: 18766 - protein, 14 aa, Severe acute respiratory syndrome-related coronavirus
  REGION 1..14: note = Table B: HLA-DQA1*01:02-B1*06:02L HLA-DQA1*01-B1*05L HLA-DQA1*05:01-B1*02:01L HLA-DPA1*03:01-B1*105:01L
  source 1..14: note = Severe acute respiratory syndrome coronavirus 2
VLYQDVNCTEVPVA

SEQ ID NO: 18767 - protein, 12 aa, Severe acute respiratory syndrome-related coronavirus
  REGION 1..12: note = Table B: HLA-DQA1*01:02-B1*06:02L
  source 1..12: note = Severe acute respiratory syndrome coronavirus 2
TEVPVAIHADQL

SEQ ID NO: 18768 - protein, 11 aa, Severe acute respiratory syndrome-related coronavirus
  REGION 1..11: note = Table B: HLA-DQA1*01:02-B1*06:02L HLA-DQA1*01:01-B1*05:01L HLA-DQA1*05:05-B1*03:19L HLA-DQA1*05:05-B1*03:01L
  source 1..11: note = Severe acute respiratory syndrome coronavirus 2
TGSNVFQTRAG

SEQ ID NO: 18769 - protein, 13 aa, Severe acute respiratory syndrome-related coronavirus
  REGION 1..13: note = Table B: HLA-DQA1*01:02-B1*06:02L HLA-DRB1*01:02L HLA-DRB1*12:01L HLA-DRB1*16:01L HLA-DQA1*02:01-B1*03:03L HLA-DRB1*15:03L
  source 1..13: note = Severe acute respiratory syndrome coronavirus 2
SNVFQTRAGCLIG

SEQ ID NO: 18770 - protein, 12 aa, Severe acute respiratory syndrome-related coronavirus
  REGION 1..12: note = Table B: HLA-DQA1*01:02-B1*06:02L HLA-DQA1*01:03-B1*06:01L
  source 1..12: note = Severe acute respiratory syndrome coronavirus 2
FQTRAGCLIGAE

SEQ ID NO: 18771 - protein, 11 aa, Severe acute respiratory syndrome-related coronavirus
  REGION 1..11: note = Table B: HLA-DQA1*01:02-B1*06:02L HLA-DQA1*01:03-B1*06:01L HLA-DQA1*02:01-B1*03:03L
  source 1..11: note = Severe acute respiratory syndrome coronavirus 2
TRAGCLIGAEH

SEQ ID NO: 18772 - protein, 12 aa, Severe acute respiratory syndrome-related coronavirus
  REGION 1..12: note = Table B: HLA-DQA1*01:02-B1*06:02L
  source 1..12: note = Severe acute respiratory syndrome coronavirus 2
RAGCLIGAEHVN

SEQ ID NO: 18773 - protein, 12 aa, Severe acute respiratory syndrome-related coronavirus
  REGION 1..12: note = Table B: HLA-DQA1*01:02-B1*06:02L
  source 1..12: note = Severe acute respiratory syndrome coronavirus 2
AGCLIGAEHVNN

SEQ ID NO: 18774 - protein, 13 aa, Severe acute respiratory syndrome-related coronavirus
  REGION 1..13: note = Table B: HLA-DQA1*01:02-B1*06:02L HLA-DQA1*01-B1*05L HLA-DQA1*03:01-B1*03:02L HLA-DQA1*01:03-B1*06:01L
  source 1..13: note = Severe acute respiratory syndrome coronavirus 2
HVNNSYECDIPIG

SEQ ID NO: 18775 - protein, 11 aa, Severe acute respiratory syndrome-related coronavirus
  REGION 1..11: note = Table B: HLA-DQA1*01:02-B1*06:02L HLA-DQA1*01:03-B1*06:01L
  source 1..11: note = Severe acute respiratory syndrome coronavirus 2
SYECDIPIGAG

SEQ ID NO: 18776 - protein, 13 aa, Severe acute respiratory syndrome-related coronavirus
  REGION 1..13: note = Table B: HLA-DQA1*01:02-B1*06:02L HLA-DQA1*05:05-B1*03:01L
  source 1..13: note = Severe acute respiratory syndrome coronavirus 2
PIGAGICASYQTQ

SEQ ID NO: 18777 - protein, 12 aa, Severe acute respiratory syndrome-related coronavirus
  REGION 1..12: note = Table B: HLA-DQA1*01:02-B1*06:02L HLA-DQA1*01:03-B1*06:01L
  source 1..12: note = Severe acute respiratory syndrome coronavirus 2
AGICASYQTQTN

SEQ ID NO: 18778 - protein, 14 aa, Severe acute respiratory syndrome-related coronavirus
  REGION 1..14: note = Table B: HLA-DQA1*01:02-B1*06:02L
  source 1..14: note = Severe acute respiratory syndrome coronavirus 2
GICASYQTQTNSPR

SEQ ID NO: 18779 - protein, 12 aa, Severe acute respiratory syndrome-related coronavirus
  REGION 1..12: note = Table B: HLA-DQA1*01:02-B1*06:02L HLA-DRB3*01:01L HLA-DPA1*03:01-B1*105:01L HLA-DPA1*01:02-B1*04:01L HLA-DRB1*07:01L HLA-DQA1*01:03-B1*06:01L HLA-DRB1*15:03L
  source 1..12: note = Severe acute respiratory syndrome coronavirus 2
ASYQTQTNSPRR

SEQ ID NO: 18780 - protein, 12 aa, Severe acute respiratory syndrome-related coronavirus
  REGION 1..12: note = Table B: HLA-DQA1*01:02-B1*06:02L HLA-DPA1*03:01-B1*105:01L HLA-DQA1*05:05-B1*03:01L HLA-DQA1*02:01-B1*03:03L
  source 1..12: note = Severe acute respiratory syndrome coronavirus 2
VASQSIIAYTMS

SEQ ID NO: 18781 - protein, 12 aa, Severe acute respiratory syndrome-related coronavirus
  REGION 1..12: note = Table B: HLA-DQA1*01:02-B1*06:02L HLA-DQA1*05:05-B1*03:19L HLA-DQA1*05:05-B1*03:01L
  source 1..12: note = Severe acute respiratory syndrome coronavirus 2
IAYTMSLGAENS

SEQ ID NO: 18782 - protein, 13 aa, Severe acute respiratory syndrome-related coronavirus
  REGION 1..13: note = Table B: HLA-DQA1*01:02-B1*06:02L HLA-DPA1*03:01-B1*105:01L
  source 1..13: note = Severe acute respiratory syndrome coronavirus 2
AYTMSLGAENSVA

SEQ ID NO: 18783 - protein, 14 aa, Severe acute respiratory syndrome-related coronavirus
  REGION 1..14: note = Table B: HLA-DQA1*01:02-B1*06:02L
  source 1..14: note = Severe acute respiratory syndrome coronavirus 2
IAIPTNFTISVTTE

SEQ ID NO: 18784 - protein, 11 aa, Severe acute respiratory syndrome-related coronavirus
  REGION 1..11: note = Table B: HLA-DQA1*01:02-B1*06:02L HLA-DPA1*01:03-B1*03:01L HLA-DQA1*05:01-B1*02:01L HLA-DQA1*02:01-B1*03:03L
  source 1..11: note = Severe acute respiratory syndrome coronavirus 2
MTKTSVDCTMY

SEQ ID NO: 18785 - protein, 14 aa, Severe acute respiratory syndrome-related coronavirus
  REGION 1..14: note = Table B: HLA-DQA1*01:02-B1*06:02L
  source 1..14: note = Severe acute respiratory syndrome coronavirus 2
TKTSVDCTMYICGD

SEQ ID NO: 18786 - protein, 12 aa, Severe acute respiratory syndrome-related coronavirus
  REGION 1..12: note = Table B: HLA-DQA1*01:02-B1*06:02L
  source 1..12: note = Severe acute respiratory syndrome coronavirus 2
SVDCTMYICGDS

SEQ ID NO: 18787 - protein, 12 aa, Severe acute respiratory syndrome-related coronavirus
  REGION 1..12: note = Table B: HLA-DQA1*01:02-B1*06:02L HLA-DPA1*03:01-B1*04:02L HLA-DPA1*01:03-B1*04:02L
  source 1..12: note = Severe acute respiratory syndrome coronavirus 2
LLQYGSFCTQLN

SEQ ID NO: 18788 - protein, 10 aa, Severe acute respiratory syndrome-related coronavirus
  REGION 1..10: note = Table B: HLA-DQA1*01:02-B1*06:02L HLA-DQA1*01:03-B1*06:01L
  source 1..10: note = Severe acute respiratory syndrome coronavirus 2
SFCTQLNRAL

SEQ ID NO: 18789 - protein, 12 aa, Severe acute respiratory syndrome-related coronavirus
  REGION 1..12: note = Table B: HLA-DQA1*01:02-B1*06:02L HLA-DRB1*01:02L HLA-DRB1*08:04L HLA-DRB1*12:02L HLA-DPA1*03:01-B1*105:01L HLA-DQA1*01:03-B1*06:01L HLA-DRB1*08:03L HLA-DRB1*15:03L
  source 1..12: note = Severe acute respiratory syndrome coronavirus 2
GIAVEQDKNTQE

SEQ ID NO: 18790 - protein, 12 aa, Severe acute respiratory syndrome-related coronavirus
  REGION 1..12: note = Table B: HLA-DQA1*01:02-B1*06:02L HLA-DRB1*01:02L HLA-DRB1*08:04L HLA-DPA1*01:03-B1*03:01L HLA-DRB1*14:02L HLA-DRB3*01:01L HLA-DPA1*02:01-B1*13:01L HLA-DPA1*03:01-B1*105:01L HLA-DQA1*05:05-B1*03:01L
  source 1..12: note = Severe acute respiratory syndrome coronavirus 2
IAVEQDKNTQEV

SEQ ID NO: 18791 - protein, 12 aa, Severe acute respiratory syndrome-related coronavirus
  REGION 1..12: note = Table B: HLA-DQA1*01:02-B1*06:02L HLA-DQA1*01-B1*05L HLA-DQA1*05:01-B1*02:01L HLA-DQA1*03:01-B1*03:02L
  source 1..12: note = Severe acute respiratory syndrome coronavirus 2
FNKVTLADAGFI

SEQ ID NO: 18792 - protein, 14 aa, Severe acute respiratory syndrome-related coronavirus
  REGION 1..14: note = Table B: HLA-DQA1*01:02-B1*06:02L
  source 1..14: note = Severe acute respiratory syndrome coronavirus 2
ADAGFIKQYGDCLG

SEQ ID NO: 18793 - protein, 14 aa, Severe acute respiratory syndrome-related coronavirus
  REGION 1..14: note = Table B: HLA-DQA1*01:02-B1*06:02L HLA-DRB1*04:08L
  source 1..14: note = Severe acute respiratory syndrome coronavirus 2
DAGFIKQYGDCLGD

SEQ ID NO: 18794 - protein, 12 aa, Severe acute respiratory syndrome-related coronavirus
  REGION 1..12: note = Table B: HLA-DQA1*01:02-B1*06:02L
  source 1..12: note = Severe acute respiratory syndrome coronavirus 2
YGDCLGDIAARD

SEQ ID NO: 18795 - protein, 13 aa, Severe acute respiratory syndrome-related coronavirus
  REGION 1..13: note = Table B: HLA-DQA1*01:02-B1*06:02L HLA-DQA1*01:03-B1*06:01L
  source 1..13: note = Severe acute respiratory syndrome coronavirus 2
LGDIAARDLICAQ

SEQ ID NO: 18796 - protein, 12 aa, Severe acute respiratory syndrome-related coronavirus
  REGION 1..12: note = Table B: HLA-DQA1*01:02-B1*06:02L HLA-DQA1*01:03-B1*06:01L HLA-DQA1*02:01-B1*03:03L
  source 1..12: note = Severe acute respiratory syndrome coronavirus 2
DIAARDLICAQK

SEQ ID NO: 18797 - protein, 12 aa, Severe acute respiratory syndrome-related coronavirus
  REGION 1..12: note = Table B: HLA-DQA1*01:02-B1*06:02L HLA-DRB1*14:01L HLA-DRB1*08:01L HLA-DPA1*01:03-B1*04:01L HLA-DRB1*12:01L HLA-DRB1*16:01L HLA-DRB1*04:08L
  source 1..12: note = Severe acute respiratory syndrome coronavirus 2
RDLICAQKFNGL

SEQ ID NO: 18798 - protein, 13 aa, Severe acute respiratory syndrome-related coronavirus
  REGION 1..13: note = Table B: HLA-DQA1*01:02-B1*06:02L
  source 1..13: note = Severe acute respiratory syndrome coronavirus 2
KFNGLTVLPPLLT

SEQ ID NO: 18799 - protein, 13 aa, Severe acute respiratory syndrome-related coronavirus
  REGION 1..13: note = Table B: HLA-DQA1*01:02-B1*06:02L HLA-DRB1*01:02L HLA-DPA1*03:01-B1*04:02L HLA-DRB1*14:01L HLA-DQA1*01:03-B1*06:01L
  source 1..13: note = Severe acute respiratory syndrome coronavirus 2
TDEMIAQYTSALL

SEQ ID NO: 18800 - protein, 12 aa, Severe acute respiratory syndrome-related coronavirus
  REGION 1..12: note = Table B: HLA-DQA1*01:02-B1*06:02L
  source 1..12: note = Severe acute respiratory syndrome coronavirus 2
MIAQYTSALLAG

SEQ ID NO: 18801 - protein, 11 aa, Severe acute respiratory syndrome-related coronavirus
  REGION 1..11: note = Table B: HLA-DQA1*01:02-B1*06:02L
  source 1..11: note = Severe acute respiratory syndrome coronavirus 2
TITSGWTFGAG

SEQ ID NO: 18802 - protein, 11 aa, Severe acute respiratory syndrome-related coronavirus
  REGION 1..11: note = Table B: HLA-DQA1*01:02-B1*06:02L HLA-DQA1*05:05-B1*03:19L HLA-DQA1*05:05-B1*03:01L HLA-DQA1*01:03-B1*06:01L
  source 1..11: note = Severe acute respiratory syndrome coronavirus 2
FGAGAALQIPF

SEQ ID NO: 18803 - protein, 11 aa, Severe acute respiratory syndrome-related coronavirus
  REGION 1..11: note = Table B: HLA-DQA1*01:02-B1*06:02L
  source 1..11: note = Severe acute respiratory syndrome coronavirus 2
GAGAALQIPFA

SEQ ID NO: 18804 - protein, 12 aa, Severe acute respiratory syndrome-related coronavirus
  REGION 1..12: note = Table B: HLA-DQA1*01:02-B1*06:02L HLA-DQA1*05:01-B1*02:01L HLA-DPA1*03:01-B1*105:01L
  source 1..12: note = Severe acute respiratory syndrome coronavirus 2
AGAALQIPFAMQ

SEQ ID NO: 18805 - protein, 10 aa, Severe acute respiratory syndrome-related coronavirus
  REGION 1..10: note = Table B: HLA-DQA1*01:02-B1*06:02L HLA-DPA1*01:03-B1*03:01L HLA-DRB1*03:01L HLA-DRB1*11:02L HLA-DQA1*05:05-B1*03:19L HLA-DQA1*05:01-B1*02:01L HLA-DRB4*01:01L HLA-DPA1*01:03-B1*04:01L HLA-DPA1*01:03-B1*104:01L
  REGION 1..10: note = CONT. FROM ABOVE: HLA-DRB1*16:01L
  source 1..10: note = Severe acute respiratory syndrome coronavirus 2
QIPFAMQMAY

SEQ ID NO: 18806 - protein, 11 aa, Severe acute respiratory syndrome-related coronavirus
  REGION 1..11: note = Table B: HLA-DQA1*01:02-B1*06:02L HLA-DRB1*01:02L HLA-DRB1*12:01L HLA-DPA1*03:01-B1*105:01L HLA-DRB1*16:01L HLA-DQA1*02:01-B1*03:03L HLA-DRB1*15:03L
  source 1..11: note = Severe acute respiratory syndrome coronavirus 2
IPFAMQMAYRF

SEQ ID NO: 18807 - protein, 12 aa, Severe acute respiratory syndrome-related coronavirus
  REGION 1..12: note = Table B: HLA-DQA1*01:02-B1*06:02L HLA-DRB1*08:04L HLA-DRB1*14:01L
  source 1..12: note = Severe acute respiratory syndrome coronavirus 2
AMQMAYRFNGIG

SEQ ID NO: 18808 - protein, 12 aa, Severe acute respiratory syndrome-related coronavirus
  REGION 1..12: note = Table B: HLA-DQA1*01:02-B1*06:02L HLA-DRB1*01:02L HLA-DRB1*15:03L
  source 1..12: note = Severe acute respiratory syndrome coronavirus 2
YRFNGIGVTQNV

SEQ ID NO: 18809 - protein, 14 aa, Severe acute respiratory syndrome-related coronavirus
  REGION 1..14: note = Table B: HLA-DQA1*01:02-B1*06:02L HLA-DQA1*05:05-B1*03:19L HLA-DQA1*05:05-B1*03:01L HLA-DQA1*01:03-B1*06:01L HLA-DQA1*02:01-B1*03:03L
  source 1..14: note = Severe acute respiratory syndrome coronavirus 2
GKIQDSLSSTASAL

SEQ ID NO: 18810 - protein, 11 aa, Severe acute respiratory syndrome-related coronavirus
  REGION 1..11: note = Table B: HLA-DQA1*01:02-B1*06:02L HLA-DPA1*03:01-B1*105:01L
  source 1..11: note = Severe acute respiratory syndrome coronavirus 2
QNAQALNTLVK

SEQ ID NO: 18811 - protein, 11 aa, Severe acute respiratory syndrome-related coronavirus
  REGION 1..11: note = Table B: HLA-DQA1*01:02-B1*06:02L HLA-DPA1*03:01-B1*04:02L HLA-DRB1*14:01L HLA-DQA1*05:05-B1*03:19L HLA-DQA1*05:01-B1*02:01L HLA-DQA1*05:05-B1*03:116L HLA-DPA1*01:02-B1*04:01L HLA-DRB1*15:03L
  source 1..11: note = Severe acute respiratory syndrome coronavirus 2
AQALNTLVKQL

SEQ ID NO: 18812 - protein, 10 aa, Severe acute respiratory syndrome-related coronavirus
  REGION 1..10: note = Table B: HLA-DQA1*01:02-B1*06:02L HLA-DQA1*01:03-B1*06:01L HLA-DQA1*02:01-B1*03:03L
  source 1..10: note = Severe acute respiratory syndrome coronavirus 2
TLVKQLSSNF

SEQ ID NO: 18813 - protein, 14 aa, Severe acute respiratory syndrome-related coronavirus
  REGION 1..14: note = Table B: HLA-DQA1*01:02-B1*06:02L
  source 1..14: note = Severe acute respiratory syndrome coronavirus 2
KQLSSNFGAISSVL

SEQ ID NO: 18814 - protein, 12 aa, Severe acute respiratory syndrome-related coronavirus
  REGION 1..12: note = Table B: HLA-DQA1*01:02-B1*06:02L HLA-DQA1*05:05-B1*03:19L HLA-DQA1*05:05-B1*03:01L HLA-DQA1*01:03-B1*06:01L
  source 1..12: note = Severe acute respiratory syndrome coronavirus 2
NFGAISSVLNDI

SEQ ID NO: 18815 - protein, 12 aa, Severe acute respiratory syndrome-related coronavirus
  REGION 1..12: note = Table B: HLA-DQA1*01:02-B1*06:02L HLA-DQA1*03:01-B1*03:02L HLA-DQA1*01:03-B1*06:01L
  source 1..12: note = Severe acute respiratory syndrome coronavirus 2
LNDILSRLDKVE

SEQ ID NO: 18816 - protein, 13 aa, Severe acute respiratory syndrome-related coronavirus
  REGION 1..13: note = Table B: HLA-DQA1*01:02-B1*06:02L
  source 1..13: note = Severe acute respiratory syndrome coronavirus 2
SRLDKVEAEVQID

SEQ ID NO: 18817 - protein, 11 aa, Severe acute respiratory syndrome-related coronavirus
  REGION 1..11: note = Table B: HLA-DQA1*01:02-B1*06:02L
  source 1..11: note = Severe acute respiratory syndrome coronavirus 2
EVQIDRLITGR

SEQ ID NO: 18818 - protein, 10 aa, Severe acute respiratory syndrome-related coronavirus
  REGION 1..10: note = Table B: HLA-DQA1*01:02-B1*06:02L HLA-DQA1*02:01-B1*03:03L
  source 1..10: note = Severe acute respiratory syndrome coronavirus 2
TGRLQSLQTY

SEQ ID NO: 18819 - protein, 12 aa, Severe acute respiratory syndrome-related coronavirus
  REGION 1..12: note = Table B: HLA-DQA1*01:02-B1*06:02L HLA-DRB1*01:02L HLA-DQA1*02:01-B1*03:03L
  source 1..12: note = Severe acute respiratory syndrome coronavirus 2
RLQSLQTYVTQQ

SEQ ID NO: 18820 - protein, 12 aa, Severe acute respiratory syndrome-related coronavirus
  REGION 1..12: note = Table B: HLA-DQA1*01:02-B1*06:02L HLA-DPA1*03:01-B1*04:02L HLA-DPA1*01:03-B1*04:02L
  source 1..12: note = Severe acute respiratory syndrome coronavirus 2
ANLAATKMSECV

SEQ ID NO: 18821 - protein, 12 aa, Severe acute respiratory syndrome-related coronavirus
  REGION 1..12: note = Table B: HLA-DQA1*01:02-B1*06:02L HLA-DPA1*03:01-B1*105:01L
  source 1..12: note = Severe acute respiratory syndrome coronavirus 2
NLAATKMSECVL

SEQ ID NO: 18822 - protein, 12 aa, Severe acute respiratory syndrome-related coronavirus
  REGION 1..12: note = Table B: HLA-DQA1*01:02-B1*06:02L HLA-DQA1*05:05-B1*03:19L HLA-DPA1*03:01-B1*105:01L HLA-DQA1*05:05-B1*03:01L HLA-DQA1*02:01-B1*03:03L
  source 1..12: note = Severe acute respiratory syndrome coronavirus 2
LAATKMSECVLG

SEQ ID NO: 18823 - protein, 12 aa, Severe acute respiratory syndrome-related coronavirus
  REGION 1..12: note = Table B: HLA-DQA1*01:02-B1*06:02L HLA-DQA1*01:03-B1*06:01L
  source 1..12: note = Severe acute respiratory syndrome coronavirus 2
ATKMSECVLGQS

SEQ ID NO: 18824 - protein, 10 aa, Severe acute respiratory syndrome-related coronavirus
  REGION 1..10: note = Table B: HLA-DQA1*01:02-B1*06:02L HLA-DQA1*01:03-B1*06:01L
  source 1..10: note = Severe acute respiratory syndrome coronavirus 2
MSECVLGQSK

SEQ ID NO: 18825 - protein, 10 aa, Severe acute respiratory syndrome-related coronavirus
  REGION 1..10: note = Table B: HLA-DQA1*01:02-B1*06:02L HLA-DQA1*03:01-B1*03:02L HLA-DQA1*01:03-B1*06:01L
  source 1..10: note = Severe acute respiratory syndrome coronavirus 2
SECVLGQSKR

SEQ ID NO: 18826 - protein, 15 aa, Severe acute respiratory syndrome-related coronavirus
  REGION 1..15: note = Table B: HLA-DQA1*01:02-B1*06:02L HLA-DRB1*01:02L HLA-DRB1*16:01L HLA-DRB1*04:08L
  source 1..15: note = Severe acute respiratory syndrome coronavirus 2
SKRVDFCGKGYHLMS

SEQ ID NO: 18827 - protein, 15 aa, Severe acute respiratory syndrome-related coronavirus
  REGION 1..15: note = Table B: HLA-DQA1*01:02-B1*06:02L
  source 1..15: note = Severe acute respiratory syndrome coronavirus 2
VDFCGKGYHLMSFPQ

SEQ ID NO: 18828 - protein, 12 aa, Severe acute respiratory syndrome-related coronavirus
  REGION 1..12: note = Table B: HLA-DQA1*01:02-B1*06:02L
  source 1..12: note = Severe acute respiratory syndrome coronavirus 2
HLMSFPQSAPHG

SEQ ID NO: 18829 - protein, 11 aa, Severe acute respiratory syndrome-related coronavirus
  REGION 1..11: note = Table B: HLA-DQA1*01:02-B1*06:02L HLA-DPA1*03:01-B1*04:02L HLA-DQA1*01-B1*05L HLA-DPA1*03:01-B1*105:01L
  source 1..11: note = Severe acute respiratory syndrome coronavirus 2
FLHVTYVPAQE

SEQ ID NO: 18830 - protein, 13 aa, Severe acute respiratory syndrome-related coronavirus
  REGION 1..13: note = Table B: HLA-DQA1*01:02-B1*06:02L HLA-DPA1*02:01-B1*13:01L
  source 1..13: note = Severe acute respiratory syndrome coronavirus 2
QEKNFTTAPAICH

SEQ ID NO: 18831 - protein, 10 aa, Severe acute respiratory syndrome-related coronavirus
  REGION 1..10: note = Table B: HLA-DQA1*01:02-B1*06:02L HLA-DQA1*05:05-B1*03:01L HLA-DQA1*01:03-B1*06:01L HLA-DQA1*02:01-B1*03:03L
  source 1..10: note = Severe acute respiratory syndrome coronavirus 2
FTTAPAICHD

SEQ ID NO: 18832 - protein, 12 aa, Severe acute respiratory syndrome-related coronavirus
  REGION 1..12: note = Table B: HLA-DQA1*01:02-B1*06:02L HLA-DQA1*02:01-B1*03:03L
  source 1..12: note = Severe acute respiratory syndrome coronavirus 2
TAPAICHDGKAH

SEQ ID NO: 18833 - protein, 13 aa, Severe acute respiratory syndrome-related coronavirus
  REGION 1..13: note = Table B: HLA-DQA1*01:02-B1*06:02L
  source 1..13: note = Severe acute respiratory syndrome coronavirus 2
ICHDGKAHFPREG

SEQ ID NO: 18834 - protein, 10 aa, Severe acute respiratory syndrome-related coronavirus
  REGION 1..10: note = Table B: HLA-DQA1*01:02-B1*06:02L HLA-DQA1*02:01-B1*03:03L
  source 1..10: note = Severe acute respiratory syndrome coronavirus 2
KAHFPREGVF

SEQ ID NO: 18835 - protein, 12 aa, Severe acute respiratory syndrome-related coronavirus
  REGION 1..12: note = Table B: HLA-DQA1*01:02-B1*06:02L HLA-DRB1*14:01L HLA-DPA1*03:01-B1*105:01L HLA-DQA1*01:03-B1*06:01L HLA-DRB1*15:03L
  source 1..12: note = Severe acute respiratory syndrome coronavirus 2
FVSNGTHWFVTQ

SEQ ID NO: 18836 - protein, 12 aa, Severe acute respiratory syndrome-related coronavirus
  REGION 1..12: note = Table B: HLA-DQA1*01:02-B1*06:02L HLA-DQA1*01:03-B1*06:01L HLA-DQA1*02:01-B1*03:03L
  source 1..12: note = Severe acute respiratory syndrome coronavirus 2
VSNGTHWFVTQR

SEQ ID NO: 18837 - protein, 12 aa, Severe acute respiratory syndrome-related coronavirus
  REGION 1..12: note = Table B: HLA-DQA1*01:02-B1*06:02L HLA-DQA1*01:03-B1*06:01L HLA-DQA1*02:01-B1*03:03L
  source 1..12: note = Severe acute respiratory syndrome coronavirus 2
SNGTHWFVTQRN

SEQ ID NO: 18838 - protein, 10 aa, Severe acute respiratory syndrome-related coronavirus
  REGION 1..10: note = Table B: HLA-DQA1*01:02-B1*06:02L HLA-DQA1*01:03-B1*06:01L HLA-DQA1*02:01-B1*03:03L
  source 1..10: note = Severe acute respiratory syndrome coronavirus 2
THWFVTQRNF

SEQ ID NO: 18839 - protein, 10 aa, Severe acute respiratory syndrome-related coronavirus
  REGION 1..10: note = Table B: HLA-DQA1*01:02-B1*06:02L HLA-DRB1*03:01L HLA-DQA1*05:05-B1*03:19L HLA-DQA1*05:01-B1*02:01L HLA-DPA1*01:03-B1*04:01L HLA-DPA1*02:01-B1*13:01L HLA-DRB1*16:01L HLA-DQA1*01:03-B1*06:01L
  REGION 1..10: note = CONT. FROM ABOVE: HLA-DQA1*02:01-B1*03:03L
  source 1..10: note = Severe acute respiratory syndrome coronavirus 2
HWFVTQRNFY

SEQ ID NO: 18840 - protein, 11 aa, Severe acute respiratory syndrome-related coronavirus
  REGION 1..11: note = Table B: HLA-DQA1*01:02-B1*06:02L HLA-DQA1*01:03-B1*06:01L
  source 1..11: note = Severe acute respiratory syndrome coronavirus 2
FVSGNCDVVIG

SEQ ID NO: 18841 - protein, 12 aa, Severe acute respiratory syndrome-related coronavirus
  REGION 1..12: note = Table B: HLA-DQA1*01:02-B1*06:02L HLA-DQA1*01:03-B1*06:01L
  source 1..12: note = Severe acute respiratory syndrome coronavirus 2
SGNCDVVIGIVN

SEQ ID NO: 18842 - protein, 12 aa, Severe acute respiratory syndrome-related coronavirus
  REGION 1..12: note = Table B: HLA-DQA1*01:02-B1*06:02L
  source 1..12: note = Severe acute respiratory syndrome coronavirus 2
GNCDVVIGIVNN

SEQ ID NO: 18843 - protein, 14 aa, Severe acute respiratory syndrome-related coronavirus
  REGION 1..14: note = Table B: HLA-DQA1*01:02-B1*06:02L
  source 1..14: note = Severe acute respiratory syndrome coronavirus 2
IGIVNNTVYDPLQP

SEQ ID NO: 18844 - protein, 10 aa, Severe acute respiratory syndrome-related coronavirus
  REGION 1..10: note = Table B: HLA-DQA1*01:02-B1*06:02L HLA-DPA1*02:01-B1*13:01L HLA-DQA1*01:03-B1*06:01L HLA-DQA1*02:01-B1*03:03L
  source 1..10: note = Severe acute respiratory syndrome coronavirus 2
SFKEELDKYF

SEQ ID NO: 18845 - protein, 12 aa, Severe acute respiratory syndrome-related coronavirus
  REGION 1..12: note = Table B: HLA-DQA1*01:02-B1*06:02L HLA-DPA1*03:01-B1*105:01L HLA-DQA1*01:03-B1*06:01L HLA-DQA1*02:01-B1*03:03L
  source 1..12: note = Severe acute respiratory syndrome coronavirus 2
LNESLIDLQELG

SEQ ID NO: 18846 - protein, 10 aa, Severe acute respiratory syndrome-related coronavirus
  REGION 1..10: note = Table B: HLA-DQA1*01:02-B1*06:02L HLA-DPA1*02:01-B1*13:01L HLA-DQA1*01:03-B1*06:01L
  source 1..10: note = Severe acute respiratory syndrome coronavirus 2
KYEQYIKWPW

SEQ ID NO: 18847 - protein, 10 aa, Severe acute respiratory syndrome-related coronavirus
  REGION 1..10: note = Table B: HLA-DQA1*01:02-B1*06:02L HLA-DQA1*01:03-B1*06:01L
  source 1..10: note = Severe acute respiratory syndrome coronavirus 2
FIAGLIAIVM

SEQ ID NO: 18848 - protein, 14 aa, Severe acute respiratory syndrome-related coronavirus
  REGION 1..14: note = Table B: HLA-DQA1*01:02-B1*06:02L
  source 1..14: note = Severe acute respiratory syndrome coronavirus 2
EDDSEPVLKGVKLH

SEQ ID NO: 18849 - protein, 11 aa, Severe acute respiratory syndrome-related coronavirus
  REGION 1..11: note = Table B: HLA-DQA1*01:02-B1*06:02L
  source 1..11: note = Severe acute respiratory syndrome coronavirus 2
FTIGTVTLKQG

SEQ ID NO: 18850 - protein, 11 aa, Severe acute respiratory syndrome-related coronavirus
  REGION 1..11: note = Table B: HLA-DQA1*01:02-B1*06:02L
  source 1..11: note = Severe acute respiratory syndrome coronavirus 2
GTVTLKQGEIK

SEQ ID NO: 18851 - protein, 13 aa, Severe acute respiratory syndrome-related coronavirus
  REGION 1..13: note = Table B: HLA-DQA1*01:02-B1*06:02L
  source 1..13: note = Severe acute respiratory syndrome coronavirus 2
TVTLKQGEIKDAT

SEQ ID NO: 18852 - protein, 13 aa, Severe acute respiratory syndrome-related coronavirus
  REGION 1..13: note = Table B: HLA-DQA1*01:02-B1*06:02L
  source 1..13: note = Severe acute respiratory syndrome coronavirus 2
VTLKQGEIKDATP

SEQ ID NO: 18853 - protein, 13 aa, Severe acute respiratory syndrome-related coronavirus
  REGION 1..13: note = Table B: HLA-DQA1*01:02-B1*06:02L
  source 1..13: note = Severe acute respiratory syndrome coronavirus 2
IKDATPSDFVRAT

SEQ ID NO: 18854 - protein, 13 aa, Severe acute respiratory syndrome-related coronavirus
  REGION 1..13: note = Table B: HLA-DQA1*01:02-B1*06:02L HLA-DQA1*05:01-B1*02:01L
  source 1..13: note = Severe acute respiratory syndrome coronavirus 2
DATPSDFVRATAT

SEQ ID NO: 18855 - protein, 11 aa, Severe acute respiratory syndrome-related coronavirus
  REGION 1..11: note = Table B: HLA-DQA1*01:02-B1*06:02L
  source 1..11: note = Severe acute respiratory syndrome coronavirus 2
ATIPIQASLPF

SEQ ID NO: 18856 - protein, 11 aa, Severe acute respiratory syndrome-related coronavirus
  REGION 1..11: note = Table B: HLA-DQA1*01:02-B1*06:02L HLA-DPA1*03:01-B1*105:01L HLA-DQA1*01:03-B1*06:01L
  source 1..11: note = Severe acute respiratory syndrome coronavirus 2
IVGVALLAVFQ

SEQ ID NO: 18857 - protein, 13 aa, Severe acute respiratory syndrome-related coronavirus
  REGION 1..13: note = Table B: HLA-DQA1*01:02-B1*06:02L
  source 1..13: note = Severe acute respiratory syndrome coronavirus 2
VGVALLAVFQSAS

SEQ ID NO: 18858 - protein, 11 aa, Severe acute respiratory syndrome-related coronavirus
  REGION 1..11: note = Table B: HLA-DQA1*01:02-B1*06:02L HLA-DPA1*01:03-B1*03:01L HLA-DRB1*11:04L HLA-DRB1*11:01L HLA-DRB5*01:01L HLA-DPA1*01:03-B1*04:01L HLA-DRB1*04:10L HLA-DPA1*02:01-B1*13:01L HLA-DRB1*08:03L
  source 1..11: note = Severe acute respiratory syndrome coronavirus 2
AVFQSASKIIT

SEQ ID NO: 18859 - protein, 11 aa, Severe acute respiratory syndrome-related coronavirus
  REGION 1..11: note = Table B: HLA-DQA1*01:02-B1*06:02L HLA-DRB1*11:04L HLA-DRB1*11:01L HLA-DRB1*16:01L
  source 1..11: note = Severe acute respiratory syndrome coronavirus 2
IITLKKRWQLA

SEQ ID NO: 18860 - protein, 14 aa, Severe acute respiratory syndrome-related coronavirus
  REGION 1..14: note = Table B: HLA-DQA1*01:02-B1*06:02L
  source 1..14: note = Severe acute respiratory syndrome coronavirus 2
LALSKGVHFVCNLL

SEQ ID NO: 18861 - protein, 10 aa, Severe acute respiratory syndrome-related coronavirus
  REGION 1..10: note = Table B: HLA-DQA1*01:02-B1*06:02L HLA-DPA1*03:01-B1*04:02L HLA-DPA1*03:01-B1*105:01L HLA-DPA1*01:02-B1*04:01L HLA-DQA1*01:03-B1*06:01L HLA-DRB1*15:03L
  source 1..10: note = Severe acute respiratory syndrome coronavirus 2
TVYSHLLLVA

SEQ ID NO: 18862 - protein, 11 aa, Severe acute respiratory syndrome-related coronavirus
  REGION 1..11: note = Table B: HLA-DQA1*01:02-B1*06:02L HLA-DPA1*01:03-B1*04:01L HLA-DRB1*16:01L HLA-DRB1*04:08L
  source 1..11: note = Severe acute respiratory syndrome coronavirus 2
VYSHLLLVAAG

SEQ ID NO: 18863 - protein, 12 aa, Severe acute respiratory syndrome-related coronavirus
  REGION 1..12: note = Table B: HLA-DQA1*01:02-B1*06:02L HLA-DPA1*03:01-B1*105:01L HLA-DQA1*01:03-B1*06:01L
  source 1..12: note = Severe acute respiratory syndrome coronavirus 2
YSHLLLVAAGLE

SEQ ID NO: 18864 - protein, 10 aa, Severe acute respiratory syndrome-related coronavirus
  REGION 1..10: note = Table B: HLA-DQA1*01:02-B1*06:02L HLA-DPA1*01:03-B1*03:01L HLA-DQA1*05:05-B1*03:19L HLA-DQA1*05:01-B1*02:01L HLA-DPA1*01:03-B1*104:01L
  source 1..10: note = Severe acute respiratory syndrome coronavirus 2
AAGLEAPFLY

SEQ ID NO: 18865 - protein, 10 aa, Severe acute respiratory syndrome-related coronavirus
  REGION 1..10: note = Table B: HLA-DQA1*01:02-B1*06:02L HLA-DPA1*03:01-B1*04:02L HLA-DQA1*01-B1*05L HLA-DQA1*05:05-B1*03:19L HLA-DQA1*05:01-B1*02:01L HLA-DPA1*01:03-B1*04:01L HLA-DPA1*03:01-B1*105:01L HLA-DPA1*01:02-B1*04:01L
  REGION 1..10: note = CONT. FROM ABOVE: HLA-DRB1*16:01L HLA-DQA1*01:03-B1*06:01L HLA-D QA1*02:01-B1*03:03L HLA-DRB1*15:03L
  source 1..10: note = Severe acute respiratory syndrome coronavirus 2
LQSINFVRII

SEQ ID NO: 18866 - protein, 12 aa, Severe acute respiratory syndrome-related coronavirus
  REGION 1..12: note = Table B: HLA-DQA1*01:02-B1*06:02L HLA-DQA1*02:01-B1*03:03L
  source 1..12: note = Severe acute respiratory syndrome coronavirus 2
RSKNPLLYDANY

SEQ ID NO: 18867 - protein, 10 aa, Severe acute respiratory syndrome-related coronavirus
  REGION 1..10: note = Table B: HLA-DQA1*01:02-B1*06:02L HLA-DPA1*03:01-B1*105:01L
  source 1..10: note = Severe acute respiratory syndrome coronavirus 2
NPLLYDANYF

SEQ ID NO: 18868 - protein, 12 aa, Severe acute respiratory syndrome-related coronavirus
  REGION 1..12: note = Table B: HLA-DQA1*01:02-B1*06:02L HLA-DPA1*01:03-B1*04:01L HLA-DPA1*01:03-B1*04:02L HLA-DPA1*03:01-B1*105:01L HLA-DRB1*16:01L HLA-DQA1*01:03-B1*06:01L HLA-DRB1*04:08L
  source 1..12: note = Severe acute respiratory syndrome coronavirus 2
YDANYFLCWHTN

SEQ ID NO: 18869 - protein, 13 aa, Severe acute respiratory syndrome-related coronavirus
  REGION 1..13: note = Table B: HLA-DQA1*01:02-B1*06:02L HLA-DPA1*03:01-B1*105:01L HLA-DQA1*01:03-B1*06:01L
  source 1..13: note = Severe acute respiratory syndrome coronavirus 2
WHTNCYDYCIPYN

SEQ ID NO: 18870 - protein, 11 aa, Severe acute respiratory syndrome-related coronavirus
  REGION 1..11: note = Table B: HLA-DQA1*01:02-B1*06:02L HLA-DPA1*03:01-B1*105:01L HLA-DQA1*05:05-B1*03:01L HLA-DQA1*01:03-B1*06:01L
  source 1..11: note = Severe acute respiratory syndrome coronavirus 2
YDYCIPYNSVT

SEQ ID NO: 18871 - protein, 12 aa, Severe acute respiratory syndrome-related coronavirus
  REGION 1..12: note = Table B: HLA-DQA1*01:02-B1*06:02L HLA-DQA1*05:05-B1*03:19L HLA-DQA1*05:05-B1*03:01L HLA-DQA1*02:01-B1*03:03L
  source 1..12: note = Severe acute respiratory syndrome coronavirus 2
NSVTSSIVITSG

SEQ ID NO: 18872 - protein, 12 aa, Severe acute respiratory syndrome-related coronavirus
  REGION 1..12: note = Table B: HLA-DQA1*01:02-B1*06:02L HLA-DRB1*08:01L HLA-DQA1*02:01-B1*03:03L
  source 1..12: note = Severe acute respiratory syndrome coronavirus 2
GGYTEKWESGVK

SEQ ID NO: 18873 - protein, 12 aa, Severe acute respiratory syndrome-related coronavirus
  REGION 1..12: note = Table B: HLA-DQA1*01:02-B1*06:02L HLA-DRB1*01:02L HLA-DRB1*08:01L HLA-DPA1*03:01-B1*105:01L HLA-DRB1*16:01L HLA-DQA1*01:03-B1*06:01L
  source 1..12: note = Severe acute respiratory syndrome coronavirus 2
GYTEKWESGVKD

SEQ ID NO: 18874 - protein, 14 aa, Severe acute respiratory syndrome-related coronavirus
  REGION 1..14: note = Table B: HLA-DQA1*01:02-B1*06:02L
  source 1..14: note = Severe acute respiratory syndrome coronavirus 2
TEKWESGVKDCVVL

SEQ ID NO: 18875 - protein, 12 aa, Severe acute respiratory syndrome-related coronavirus
  REGION 1..12: note = Table B: HLA-DQA1*01:02-B1*06:02L
  source 1..12: note = Severe acute respiratory syndrome coronavirus 2
WESGVKDCVVLH

SEQ ID NO: 18876 - protein, 10 aa, Severe acute respiratory syndrome-related coronavirus
  REGION 1..10: note = Table B: HLA-DQA1*01:02-B1*06:02L HLA-DQA1*05:05-B1*03:19L HLA-DQA1*01:03-B1*06:01L HLA-DQA1*02:01-B1*03:03L
  source 1..10: note = Severe acute respiratory syndrome coronavirus 2
VKDCVVLHSY

SEQ ID NO: 18877 - protein, 10 aa, Severe acute respiratory syndrome-related coronavirus
  REGION 1..10: note = Table B: HLA-DQA1*01:02-B1*06:02L HLA-DPA1*01:03-B1*03:01L HLA-DQA1*01-B1*05L HLA-DQA1*05:05-B1*03:19L HLA-DQA1*05:01-B1*02:01L HLA-DPA1*01:03-B1*104:01L HLA-DQA1*02:01-B1*03:03L
  source 1..10: note = Severe acute respiratory syndrome coronavirus 2
VLHSYFTSDY

SEQ ID NO: 18878 - protein, 10 aa, Severe acute respiratory syndrome-related coronavirus
  REGION 1..10: note = Table B: HLA-DQA1*01:02-B1*06:02L HLA-DRB1*08:77L HLA-DPA1*01:03-B1*03:01L HLA-DPA1*03:01-B1*04:02L HLA-DRB1*03:01L HLA-DRB1*11:02L HLA-DRB1*14:02L HLA-DQA1*01-B1*05L HLA-DQA1*05:05-B1*03:19M
  REGION 1..10: note = CONT. FROM ABOVE: HLA-DQA1*05:01-B1*02:01L HLA-DRB4*01:01L HLA-D PA1*01:03-B1*04:01L HLA-DQA1*05:05-B1*03:116L HLA-DPA1*01:03-B1* 04:02L HLA-DPA1*02:01-B1*13:01L HLA-DPA1*03:01-B1*105:01L HLA-DP A1*01:03-B1*104:01L HLA-DRB1*10:01L HLA-DRB1*16:01L
  REGION 1..10: note = CONT. FROM ABOVE: HLA-DQA1*01:03-B1*06:01L HLA-DRB1*15:03L
  source 1..10: note = Severe acute respiratory syndrome coronavirus 2
YFTSDYYQLY

SEQ ID NO: 18879 - protein, 13 aa, Severe acute respiratory syndrome-related coronavirus
  REGION 1..13: note = Table B: HLA-DQA1*01:02-B1*06:02L HLA-DQA1*01-B1*05L
  source 1..13: note = Severe acute respiratory syndrome coronavirus 2
LYSTQLSTDTGVE

SEQ ID NO: 18880 - protein, 13 aa, Severe acute respiratory syndrome-related coronavirus
  REGION 1..13: note = Table B: HLA-DQA1*01:02-B1*06:02L
  source 1..13: note = Severe acute respiratory syndrome coronavirus 2
YSTQLSTDTGVEH

SEQ ID NO: 18881 - protein, 13 aa, Severe acute respiratory syndrome-related coronavirus
  REGION 1..13: note = Table B: HLA-DQA1*01:02-B1*06:02L HLA-DRB1*01:02L HLA-DRB1*08:04L HLA-DRB1*08:77L HLA-DPA1*01:03-B1*03:01L HLA-DRB1*03:01L HLA-DRB1*14:01L HLA-DRB3*01:01L HLA-DRB1*04:08L
  source 1..13: note = Severe acute respiratory syndrome coronavirus 2
TQLSTDTGVEHVT

SEQ ID NO: 18882 - protein, 10 aa, Severe acute respiratory syndrome-related coronavirus
  REGION 1..10: note = Table B: HLA-DQA1*01:02-B1*06:02L HLA-DPA1*01:03-B1*03:01L HLA-DRB1*11:02L HLA-DQA1*05:05-B1*03:19M HLA-DQA1*05:01-B1*02:01L HLA-DPA1*01:03-B1*104:01L HLA-DRB1*16:01L
  source 1..10: note = Severe acute respiratory syndrome coronavirus 2
GVEHVTFFIY

SEQ ID NO: 18883 - protein, 14 aa, Severe acute respiratory syndrome-related coronavirus
  REGION 1..14: note = Table B: HLA-DQA1*01:02-B1*06:02L HLA-DRB1*01:02L HLA-DRB1*08:04L HLA-DRB1*14:01L HLA-DRB1*08:01L HLA-DQA1*01-B1*05L HLA-DPA1*01:03-B1*04:02L HLA-DRB1*12:01L HLA-DPA1*02:01-B1*13:01L HLA-DRB1*16:01L
  REGION 1..14: note = CONT. FROM ABOVE: HLA-DQA1*01:03-B1*06:01L HLA-DRB1*04:08L
  source 1..14: note = Severe acute respiratory syndrome coronavirus 2
VEHVTFFIYNKIVD

SEQ ID NO: 18884 - protein, 13 aa, Severe acute respiratory syndrome-related coronavirus
  REGION 1..13: note = Table B: HLA-DQA1*01:02-B1*06:02L HLA-DPA1*01:03-B1*04:01L HLA-DPA1*01:03-B1*04:02L HLA-DPA1*02:01-B1*13:01L HLA-DRB1*16:01L HLA-DRB1*15:03L
  source 1..13: note = Severe acute respiratory syndrome coronavirus 2
VTFFIYNKIVDEP

SEQ ID NO: 18885 - protein, 12 aa, Severe acute respiratory syndrome-related coronavirus
  REGION 1..12: note = Table B: HLA-DQA1*01:02-B1*06:02L HLA-DQA1*03:01-B1*03:02L HLA-DQA1*01:03-B1*06:01L HLA-DQA1*02:01-B1*03:03L
  source 1..12: note = Severe acute respiratory syndrome coronavirus 2
EPEEHVQIHTID

SEQ ID NO: 18886 - protein, 12 aa, Severe acute respiratory syndrome-related coronavirus
  REGION 1..12: note = Table B: HLA-DQA1*01:02-B1*06:02L HLA-DQA1*01:03-B1*06:01L HLA-DQA1*02:01-B1*03:03L
  source 1..12: note = Severe acute respiratory syndrome coronavirus 2
PEEHVQIHTIDG

SEQ ID NO: 18887 - protein, 14 aa, Severe acute respiratory syndrome-related coronavirus
  REGION 1..14: note = Table B: HLA-DQA1*01:02-B1*06:02L HLA-DRB1*01:02L HLA-DRB1*12:01L HLA-DPA1*03:01-B1*105:01L HLA-DQA1*02:01-B1*03:03L
  source 1..14: note = Severe acute respiratory syndrome coronavirus 2
PVMEPIYDEPTTTT

SEQ ID NO: 18888 - protein, 10 aa, Severe acute respiratory syndrome-related coronavirus
  REGION 1..10: note = Table B: HLA-DQA1*01:02-B1*06:02L HLA-DPA1*02:01-B1*13:01L HLA-DQA1*01:03-B1*06:01L HLA-DRB1*15:03L
  source 1..10: note = Severe acute respiratory syndrome coronavirus 2
TLIVNSVLLF

SEQ ID NO: 18889 - protein, 10 aa, Severe acute respiratory syndrome-related coronavirus
  REGION 1..10: note = Table B: HLA-DQA1*01:02-B1*06:02L HLA-DPA1*03:01-B1*105:01L HLA-DQA1*03:01-B1*03:02L HLA-DQA1*05:05-B1*03:01L HLA-DQA1*01:03-B1*06:01L HLA-DQA1*02:01-B1*03:03L
  source 1..10: note = Severe acute respiratory syndrome coronavirus 2
VTLAILTALR

SEQ ID NO: 18890 - protein, 10 aa, Severe acute respiratory syndrome-related coronavirus
  REGION 1..10: note = Table B: HLA-DQA1*01:02-B1*06:02L HLA-DQA1*05:05-B1*03:19L HLA-DQA1*05:01-B1*02:01L HLA-DRB1*15:03L
  source 1..10: note = Severe acute respiratory syndrome coronavirus 2
ILTALRLCAY

SEQ ID NO: 18891 - protein, 14 aa, Severe acute respiratory syndrome-related coronavirus
  REGION 1..14: note = Table B: HLA-DQA1*01:02-B1*06:02L HLA-DPA1*01:03-B1*03:01L HLA-DPA1*03:01-B1*04:02L HLA-DPA1*01:03-B1*04:02L HLA-DRB1*12:01L HLA-DPA1*02:01-B1*13:01L HLA-DPA1*03:01-B1*105:01L HLA-DPA1*01:03-B1*104:01L
  source 1..14: note = Severe acute respiratory syndrome coronavirus 2
TALRLCAYCCNIVN

SEQ ID NO: 18892 - protein, 16 aa, Severe acute respiratory syndrome-related coronavirus
  REGION 1..16: note = Table B: HLA-DQA1*01:02-B1*06:02L
  source 1..16: note = Severe acute respiratory syndrome coronavirus 2
LCAYCCNIVNVSLVKP

SEQ ID NO: 18893 - protein, 11 aa, Severe acute respiratory syndrome-related coronavirus
  REGION 1..11: note = Table B: HLA-DQA1*01:02-B1*06:02L HLA-DRB1*01:02L HLA-DRB1*14:01L HLA-DRB1*04:10L HLA-DQA1*05:05-B1*03:01L
  source 1..11: note = Severe acute respiratory syndrome coronavirus 2
NIVNVSLVKPS

SEQ ID NO: 18894 - protein, 13 aa, Severe acute respiratory syndrome-related coronavirus
  REGION 1..13: note = Table B: HLA-DQA1*01:02-B1*06:02L
  source 1..13: note = Severe acute respiratory syndrome coronavirus 2
LVKPSFYVYSRVK

SEQ ID NO: 18895 - protein, 14 aa, Severe acute respiratory syndrome-related coronavirus
  REGION 1..14: note = Table B: HLA-DQA1*01:02-B1*06:02L
  source 1..14: note = Severe acute respiratory syndrome coronavirus 2
KKLLEQWNLVIGFL

SEQ ID NO: 18896 - protein, 12 aa, Severe acute respiratory syndrome-related coronavirus
  REGION 1..12: note = Table B: HLA-DQA1*01:02-B1*06:02L
  source 1..12: note = Severe acute respiratory syndrome coronavirus 2
ICLLQFAYANRN

SEQ ID NO: 18897 - protein, 12 aa, Severe acute respiratory syndrome-related coronavirus
  REGION 1..12: note = Table B: HLA-DQA1*01:02-B1*06:02L
  source 1..12: note = Severe acute respiratory syndrome coronavirus 2
TLACFVLAAVYR

SEQ ID NO: 18898 - protein, 13 aa, Severe acute respiratory syndrome-related coronavirus
  REGION 1..13: note = Table B: HLA-DQA1*01:02-B1*06:02L HLA-DRB1*01:02L HLA-DRB1*08:04L HLA-DPA1*01:03-B1*03:01L HLA-DPA1*03:01-B1*04:02L HLA-DQA1*01-B1*05L HLA-DRB1*12:01L HLA-DPA1*02:01-B1*13:01L HLA-DPA1*03:01-B1*105:01L
  REGION 1..13: note = CONT. FROM ABOVE: HLA-DRB1*16:01L HLA-DRB1*15:03L
  source 1..13: note = Severe acute respiratory syndrome coronavirus 2
AAVYRINWITGGI

SEQ ID NO: 18899 - protein, 10 aa, Severe acute respiratory syndrome-related coronavirus
  REGION 1..10: note = Table B: HLA-DQA1*01:02-B1*06:02L HLA-DQA1*05:05-B1*03:19L HLA-DPA1*03:01-B1*105:01L HLA-DQA1*05:05-B1*03:01L HLA-DQA1*01:03-B1*06:01L
  source 1..10: note = Severe acute respiratory syndrome coronavirus 2
WITGGIAIAM

SEQ ID NO: 18900 - protein, 12 aa, Severe acute respiratory syndrome-related coronavirus
  REGION 1..12: note = Table B: HLA-DQA1*01:02-B1*06:02L HLA-DPA1*03:01-B1*105:01L
  source 1..12: note = Severe acute respiratory syndrome coronavirus 2
GGIAIAMACLVG

SEQ ID NO: 18901 - protein, 12 aa, Severe acute respiratory syndrome-related coronavirus
  REGION 1..12: note = Table B: HLA-DQA1*01:02-B1*06:02L HLA-DRB1*08:04L HLA-DPA1*01:03-B1*04:02L HLA-DRB1*16:01L HLA-DRB1*04:08L
  source 1..12: note = Severe acute respiratory syndrome coronavirus 2
YFIASFRLFART

SEQ ID NO: 18902 - protein, 13 aa, Severe acute respiratory syndrome-related coronavirus
  REGION 1..13: note = Table B: HLA-DQA1*01:02-B1*06:02L HLA-DRB1*01:02L HLA-DQA1*03:01-B1*03:02L HLA-DQA1*01:03-B1*06:01L HLA-DQA1*02:01-B1*03:03L
  source 1..13: note = Severe acute respiratory syndrome coronavirus 2
FARTRSMWSFNPE

SEQ ID NO: 18903 - protein, 13 aa, Severe acute respiratory syndrome-related coronavirus
  REGION 1..13: note = Table B: HLA-DQA1*01:02-B1*06:02L
  source 1..13: note = Severe acute respiratory syndrome coronavirus 2
SFNPETNILLNVP

SEQ ID NO: 18904 - protein, 13 aa, Severe acute respiratory syndrome-related coronavirus
  REGION 1..13: note = Table B: HLA-DQA1*01:02-B1*06:02L HLA-DQA1*03:01-B1*03:02L HLA-DQA1*01:03-B1*06:01L HLA-DQA1*02:01-B1*03:03L
  source 1..13: note = Severe acute respiratory syndrome coronavirus 2
NPETNILLNVPLH

SEQ ID NO: 18905 - protein, 11 aa, Severe acute respiratory syndrome-related coronavirus
  REGION 1..11: note = Table B: HLA-DQA1*01:02-B1*06:02L HLA-DPA1*01:03-B1*03:01L HLA-DPA1*03:01-B1*04:02L HLA-DQA1*05:01-B1*02:01L HLA-DPA1*01:03-B1*04:02L HLA-DPA1*02:01-B1*13:01L HLA-DPA1*03:01-B1*105:01L HLA-DPA1*01:03-B1*104:01L
  REGION 1..11: note = CONT. FROM ABOVE: HLA-DPA1*01:02-B1*04:01L HLA-DQA1*01:03-B1*06: 01L
  source 1..11: note = Severe acute respiratory syndrome coronavirus 2
ILLNVPLHGTI

SEQ ID NO: 18906 - protein, 12 aa, Severe acute respiratory syndrome-related coronavirus
  REGION 1..12: note = Table B: HLA-DQA1*01:02-B1*06:02L HLA-DPA1*01:03-B1*04:02L HLA-DPA1*02:01-B1*13:01L HLA-DRB1*15:03L
  source 1..12: note = Severe acute respiratory syndrome coronavirus 2
TILTRPLLESEL

SEQ ID NO: 18907 - protein, 12 aa, Severe acute respiratory syndrome-related coronavirus
  REGION 1..12: note = Table B: HLA-DQA1*01:02-B1*06:02L
  source 1..12: note = Severe acute respiratory syndrome coronavirus 2
ILTRPLLESELV

SEQ ID NO: 18908 - protein, 10 aa, Severe acute respiratory syndrome-related coronavirus
  REGION 1..10: note = Table B: HLA-DQA1*01:02-B1*06:02L HLA-DQA1*01:03-B1*06:01L
  source 1..10: note = Severe acute respiratory syndrome coronavirus 2
IGAVILRGHL

SEQ ID NO: 18909 - protein, 14 aa, Severe acute respiratory syndrome-related coronavirus
  REGION 1..14: note = Table B: HLA-DQA1*01:02-B1*06:02L
  source 1..14: note = Severe acute respiratory syndrome coronavirus 2
HHLGRCDIKDLPKE

SEQ ID NO: 18910 - protein, 14 aa, Severe acute respiratory syndrome-related coronavirus
  REGION 1..14: note = Table B: HLA-DQA1*01:02-B1*06:02L HLA-DRB1*01:02L
  source 1..14: note = Severe acute respiratory syndrome coronavirus 2
IKDLPKEITVATSR

SEQ ID NO: 18911 - protein, 12 aa, Severe acute respiratory syndrome-related coronavirus
  REGION 1..12: note = Table B: HLA-DQA1*01:02-B1*06:02L
  source 1..12: note = Severe acute respiratory syndrome coronavirus 2
RTLSYYKLGASQ

SEQ ID NO: 18912 - protein, 12 aa, Severe acute respiratory syndrome-related coronavirus
  REGION 1..12: note = Table B: HLA-DQA1*01:02-B1*06:02L
  source 1..12: note = Severe acute respiratory syndrome coronavirus 2
KLGASQRVAGDS

SEQ ID NO: 18913 - protein, 11 aa, Severe acute respiratory syndrome-related coronavirus
  REGION 1..11: note = Table B: HLA-DQA1*01:02-B1*06:02L
  source 1..11: note = Severe acute respiratory syndrome coronavirus 2
AAYSRYRIGNY

SEQ ID NO: 18914 - protein, 14 aa, Severe acute respiratory syndrome-related coronavirus
  REGION 1..14: note = Table B: HLA-DQA1*01:02-B1*06:02L HLA-DRB1*01:02L
  source 1..14: note = Severe acute respiratory syndrome coronavirus 2
YSRYRIGNYKLNTD

SEQ ID NO: 18915 - protein, 14 aa, Severe acute respiratory syndrome-related coronavirus
  REGION 1..14: note = Table B: HLA-DQA1*01:02-B1*06:02L
  source 1..14: note = Severe acute respiratory syndrome coronavirus 2
NTDHSSSSDNIALL

SEQ ID NO: 18916 - protein, 13 aa, Severe acute respiratory syndrome-related coronavirus
  REGION 1..13: note = Table B: HLA-DQA1*01:02-B1*06:02L HLA-DRB1*14:01L HLA-DPA1*02:01-B1*13:01L
  source 1..13: note = Severe acute respiratory syndrome coronavirus 2
HLVDFQVTIAEIL

SEQ ID NO: 18917 - protein, 12 aa, Severe acute respiratory syndrome-related coronavirus
  REGION 1..12: note = Table B: HLA-DQA1*01:02-B1*06:02L
  source 1..12: note = Severe acute respiratory syndrome coronavirus 2
VTIAEILLIIMR

SEQ ID NO: 18918 - protein, 10 aa, Severe acute respiratory syndrome-related coronavirus
  REGION 1..10: note = Table B: HLA-DQA1*01:02-B1*06:02L HLA-DQA1*05:01-B1*02:01L HLA-DPA1*01:03-B1*04:01L HLA-DPA1*03:01-B1*105:01L HLA-DQA1*02:01-B1*03:03L HLA-DRB1*15:03L
  source 1..10: note = Severe acute respiratory syndrome coronavirus 2
EILLIIMRTF

SEQ ID NO: 18919 - protein, 12 aa, Severe acute respiratory syndrome-related coronavirus
  REGION 1..12: note = Table B: HLA-DQA1*01:02-B1*06:02L HLA-DPA1*03:01-B1*04:02L HLA-DPA1*03:01-B1*105:01L
  source 1..12: note = Severe acute respiratory syndrome coronavirus 2
ILLIIMRTFKVS

SEQ ID NO: 18920 - protein, 13 aa, Severe acute respiratory syndrome-related coronavirus
  REGION 1..13: note = Table B: HLA-DQA1*01:02-B1*06:02L HLA-DRB1*01:02L HLA-DPA1*01:03-B1*03:01L HLA-DRB1*08:01L HLA-DPA1*02:01-B1*13:01L HLA-DPA1*01:03-B1*104:01L HLA-DQA1*01:03-B1*06:01L HLA-DRB1*15:03L
  source 1..13: note = Severe acute respiratory syndrome coronavirus 2
IMRTFKVSIWNLD

SEQ ID NO: 18921 - protein, 10 aa, Severe acute respiratory syndrome-related coronavirus
  REGION 1..10: note = Table B: HLA-DQA1*01:02-B1*06:02L HLA-DPA1*01:03-B1*03:01L HLA-DPA1*03:01-B1*04:02L HLA-DQA1*05:05-B1*03:19L HLA-DQA1*05:01-B1*02:01L HLA-DPA1*01:03-B1*04:01L HLA-DPA1*03:01-B1*105:01L HLA-DPA1*01:03-B1*104:01L
  REGION 1..10: note = CONT. FROM ABOVE: HLA-DRB1*16:01L
  source 1..10: note = Severe acute respiratory syndrome coronavirus 2
FKVSIWNLDY

SEQ ID NO: 18922 - protein, 12 aa, Severe acute respiratory syndrome-related coronavirus
  REGION 1..12: note = Table B: HLA-DQA1*01:02-B1*06:02L HLA-DQA1*05:01-B1*02:01L HLA-DPA1*03:01-B1*105:01L HLA-DRB1*15:03L
  source 1..12: note = Severe acute respiratory syndrome coronavirus 2
KVSIWNLDYIIN

SEQ ID NO: 18923 - protein, 13 aa, Severe acute respiratory syndrome-related coronavirus
  REGION 1..13: note = Table B: HLA-DQA1*01:02-B1*06:02L HLA-DRB1*01:02L HLA-DQA1*05:01-B1*02:01L HLA-DPA1*01:03-B1*04:02L HLA-DRB1*12:01L HLA-DPA1*01:02-B1*04:01L HLA-DRB1*16:01L
  source 1..13: note = Severe acute respiratory syndrome coronavirus 2
IWNLDYIINLIIK

SEQ ID NO: 18924 - protein, 10 aa, Severe acute respiratory syndrome-related coronavirus
  REGION 1..10: note = Table B: HLA-DQA1*01:02-B1*06:02L
  source 1..10: note = Severe acute respiratory syndrome coronavirus 2
ITLATCELYH

SEQ ID NO: 18925 - protein, 10 aa, Severe acute respiratory syndrome-related coronavirus
  REGION 1..10: note = Table B: HLA-DQA1*01:02-B1*06:02L HLA-DQA1*05:05-B1*03:19L HLA-DQA1*05:01-B1*02:01L
  source 1..10: note = Severe acute respiratory syndrome coronavirus 2
TLATCELYHY

SEQ ID NO: 18926 - protein, 10 aa, Severe acute respiratory syndrome-related coronavirus
  REGION 1..10: note = Table B: HLA-DQA1*01:02-B1*06:02L HLA-DPA1*03:01-B1*105:01L HLA-DQA1*01:03-B1*06:01L
  source 1..10: note = Severe acute respiratory syndrome coronavirus 2
LATCELYHYQ

SEQ ID NO: 18927 - protein, 11 aa, Severe acute respiratory syndrome-related coronavirus
  REGION 1..11: note = Table B: HLA-DQA1*01:02-B1*06:02L
  source 1..11: note = Severe acute respiratory syndrome coronavirus 2
YHYQECVRGTT

SEQ ID NO: 18928 - protein, 12 aa, Severe acute respiratory syndrome-related coronavirus
  REGION 1..12: note = Table B: HLA-DQA1*01:02-B1*06:02L HLA-DRB1*11:01L
  source 1..12: note = Severe acute respiratory syndrome coronavirus 2
HYQECVRGTTVL

SEQ ID NO: 18929 - protein, 15 aa, Severe acute respiratory syndrome-related coronavirus
  REGION 1..15: note = Table B: HLA-DQA1*01:02-B1*06:02L HLA-DRB1*01:02L
  source 1..15: note = Severe acute respiratory syndrome coronavirus 2
VRGTTVLLKEPCSSG

SEQ ID NO: 18930 - protein, 13 aa, Severe acute respiratory syndrome-related coronavirus
  REGION 1..13: note = Table B: HLA-DQA1*01:02-B1*06:02L
  source 1..13: note = Severe acute respiratory syndrome coronavirus 2
TVLLKEPCSSGTY

SEQ ID NO: 18931 - protein, 15 aa, Severe acute respiratory syndrome-related coronavirus
  REGION 1..15: note = Table B: HLA-DQA1*01:02-B1*06:02L HLA-DQA1*01:03-B1*06:01L
  source 1..15: note = Severe acute respiratory syndrome coronavirus 2
LKEPCSSGTYEGNSP

SEQ ID NO: 18932 - protein, 13 aa, Severe acute respiratory syndrome-related coronavirus
  REGION 1..13: note = Table B: HLA-DQA1*01:02-B1*06:02L HLA-DRB1*08:01L HLA-DQA1*01:03-B1*06:01L
  source 1..13: note = Severe acute respiratory syndrome coronavirus 2
SSGTYEGNSPFHP

SEQ ID NO: 18933 - protein, 12 aa, Severe acute respiratory syndrome-related coronavirus
  REGION 1..12: note = Table B: HLA-DQA1*01:02-B1*06:02L
  source 1..12: note = Severe acute respiratory syndrome coronavirus 2
GNSPFHPLADNK

SEQ ID NO: 18934 - protein, 13 aa, Severe acute respiratory syndrome-related coronavirus
  REGION 1..13: note = Table B: HLA-DQA1*01:02-B1*06:02L HLA-DPA1*03:01-B1*04:02L HLA-DPA1*01:03-B1*04:02L HLA-DRB1*15:03L
  source 1..13: note = Severe acute respiratory syndrome coronavirus 2
NKFALTCFSTQFA

SEQ ID NO: 18935 - protein, 13 aa, Severe acute respiratory syndrome-related coronavirus
  REGION 1..13: note = Table B: HLA-DQA1*01:02-B1*06:02L HLA-DPA1*01:02-B1*04:01L
  source 1..13: note = Severe acute respiratory syndrome coronavirus 2
ARSVSPKLFIRQE

SEQ ID NO: 18936 - protein, 12 aa, Severe acute respiratory syndrome-related coronavirus
  REGION 1..12: note = Table B: HLA-DQA1*01:02-B1*06:02L
  source 1..12: note = Severe acute respiratory syndrome coronavirus 2
SVSPKLFIRQEE

SEQ ID NO: 18937 - protein, 12 aa, Severe acute respiratory syndrome-related coronavirus
  REGION 1..12: note = Table B: HLA-DQA1*01:02-B1*06:02L HLA-DRB1*08:01L HLA-DQA1*01-B1*05L HLA-DQA1*05:01-B1*02:01L HLA-DQA1*03:01-B1*03:02L HLA-DQA1*02:01-B1*03:03L
  source 1..12: note = Severe acute respiratory syndrome coronavirus 2
SPKLFIRQEEVQ

SEQ ID NO: 18938 - protein, 10 aa, Severe acute respiratory syndrome-related coronavirus
  REGION 1..10: note = Table B: HLA-DQA1*01:02-B1*06:02L
  source 1..10: note = Severe acute respiratory syndrome coronavirus 2
IVAAIVFITL

SEQ ID NO: 18939 - protein, 13 aa, Severe acute respiratory syndrome-related coronavirus
  REGION 1..13: note = Table B: HLA-DQA1*01:02-B1*06:02L HLA-DPA1*01:02-B1*04:01L
  source 1..13: note = Severe acute respiratory syndrome coronavirus 2
IIFWFSLELQDHN

SEQ ID NO: 18940 - protein, 12 aa, Severe acute respiratory syndrome-related coronavirus
  REGION 1..12: note = Table B: HLA-DQA1*01:02-B1*06:02L HLA-DQA1*01:03-B1*06:01L
  source 1..12: note = Severe acute respiratory syndrome coronavirus 2
WFSLELQDHNET

SEQ ID NO: 18941 - protein, 14 aa, Severe acute respiratory syndrome-related coronavirus
  REGION 1..14: note = Table B: HLA-DQA1*01:02-B1*06:02L HLA-DRB1*01:02L
  source 1..14: note = Severe acute respiratory syndrome coronavirus 2
FSLELQDHNETCHA

SEQ ID NO: 18942 - protein, 12 aa, Severe acute respiratory syndrome-related coronavirus
  REGION 1..12: note = Table B: HLA-DQA1*01:02-B1*06:02L
  source 1..12: note = Severe acute respiratory syndrome coronavirus 2
TVAAFHQECSLQ

SEQ ID NO: 18943 - protein, 12 aa, Severe acute respiratory syndrome-related coronavirus
  REGION 1..12: note = Table B: HLA-DQA1*01:02-B1*06:02L
  source 1..12: note = Severe acute respiratory syndrome coronavirus 2
FHQECSLQSCTQ

SEQ ID NO: 18944 - protein, 12 aa, Severe acute respiratory syndrome-related coronavirus
  REGION 1..12: note = Table B: HLA-DQA1*01:02-B1*06:02L HLA-DQA1*01:03-B1*06:01L
  source 1..12: note = Severe acute respiratory syndrome coronavirus 2
HQECSLQSCTQH

SEQ ID NO: 18945 - protein, 10 aa, Severe acute respiratory syndrome-related coronavirus
  REGION 1..10: note = Table B: HLA-DQA1*01:02-B1*06:02L HLA-DQA1*01:03-B1*06:01L HLA-DQA1*02:01-B1*03:03L
  source 1..10: note = Severe acute respiratory syndrome coronavirus 2
LQSCTQHQPY

SEQ ID NO: 18946 - protein, 11 aa, Severe acute respiratory syndrome-related coronavirus
  REGION 1..11: note = Table B: HLA-DQA1*01:02-B1*06:02L HLA-DQA1*02:01-B1*03:03L
  source 1..11: note = Severe acute respiratory syndrome coronavirus 2
DPCPIHFYSKW

SEQ ID NO: 18947 - protein, 15 aa, Severe acute respiratory syndrome-related coronavirus
  REGION 1..15: note = Table B: HLA-DQA1*01:02-B1*06:02L HLA-DRB1*11:04L HLA-DPA1*01:03-B1*02:01L
  source 1..15: note = Severe acute respiratory syndrome coronavirus 2
PIHFYSKWYIRVGAR

SEQ ID NO: 18948 - protein, 14 aa, Severe acute respiratory syndrome-related coronavirus
  REGION 1..14: note = Table B: HLA-DQA1*01:02-B1*06:02L HLA-DPA1*02:01-B1*13:01L
  source 1..14: note = Severe acute respiratory syndrome coronavirus 2
ARKSAPLIELCVDE

SEQ ID NO: 18949 - protein, 14 aa, Severe acute respiratory syndrome-related coronavirus
  REGION 1..14: note = Table B: HLA-DQA1*01:02-B1*06:02L
  source 1..14: note = Severe acute respiratory syndrome coronavirus 2
KSAPLIELCVDEAG

SEQ ID NO: 18950 - protein, 13 aa, Severe acute respiratory syndrome-related coronavirus
  REGION 1..13: note = Table B: HLA-DQA1*01:02-B1*06:02L HLA-DPA1*02:01-B1*13:01L HLA-DQA1*01:03-B1*06:01L HLA-DQA1*02:01-B1*03:03L
  source 1..13: note = Severe acute respiratory syndrome coronavirus 2
AGSKSPIQYIDIG

SEQ ID NO: 18951 - protein, 10 aa, Severe acute respiratory syndrome-related coronavirus
  REGION 1..10: note = Table B: HLA-DQA1*01:02-B1*06:02L HLA-DPA1*01:03-B1*03:01L HLA-DRB1*14:02L HLA-DQA1*01-B1*05L HLA-DQA1*05:05-B1*03:19L HLA-DQA1*05:01-B1*02:01L HLA-DPA1*03:01-B1*105:01L HLA-DPA1*01:03-B1*104:01L HLA-DRB1*16:01L
  REGION 1..10: note = CONT. FROM ABOVE: HLA-DQA1*02:01-B1*03:03L HLA-DRB1*15:03L
  source 1..10: note = Severe acute respiratory syndrome coronavirus 2
PIQYIDIGNY

SEQ ID NO: 18952 - protein, 10 aa, Severe acute respiratory syndrome-related coronavirus
  REGION 1..10: note = Table B: HLA-DQA1*01:02-B1*06:02L HLA-DQA1*01:03-B1*06:01L
  source 1..10: note = Severe acute respiratory syndrome coronavirus 2
TVSCLPFTIN

SEQ ID NO: 18953 - protein, 12 aa, Severe acute respiratory syndrome-related coronavirus
  REGION 1..12: note = Table B: HLA-DQA1*01:02-B1*06:02L
  source 1..12: note = Severe acute respiratory syndrome coronavirus 2
PFTINCQEPKLG

SEQ ID NO: 18954 - protein, 12 aa, Severe acute respiratory syndrome-related coronavirus
  REGION 1..12: note = Table B: HLA-DQA1*01:02-B1*06:02L HLA-DQA1*01:03-B1*06:01L
  source 1..12: note = Severe acute respiratory syndrome coronavirus 2
TINCQEPKLGSL

SEQ ID NO: 18955 - protein, 14 aa, Severe acute respiratory syndrome-related coronavirus
  REGION 1..14: note = Table B: HLA-DQA1*01:02-B1*06:02L
  source 1..14: note = Severe acute respiratory syndrome coronavirus 2
PKLGSLVVRCSFYE

SEQ ID NO: 18956 - protein, 12 aa, Severe acute respiratory syndrome-related coronavirus
  REGION 1..12: note = Table B: HLA-DQA1*01:02-B1*06:02L HLA-DPA1*03:01-B1*04:02L HLA-DPA1*03:01-B1*105:01L
  source 1..12: note = Severe acute respiratory syndrome coronavirus 2
VVRCSFYEDFLE

SEQ ID NO: 18957 - protein, 11 aa, Severe acute respiratory syndrome-related coronavirus
  REGION 1..11: note = Table B: HLA-DQA1*01:02-B1*06:02L HLA-DPA1*01:03-B1*04:02L
  source 1..11: note = Severe acute respiratory syndrome coronavirus 2
YEDFLEYHDVR

SEQ ID NO: 18958 - protein, 10 aa, Severe acute respiratory syndrome-related coronavirus
  REGION 1..10: note = Table B: HLA-DQA1*01:02-B1*06:02L HLA-DPA1*02:01-B1*13:01L HLA-DPA1*03:01-B1*105:01L HLA-DQA1*01:03-B1*06:01L HLA-DQA1*02:01-B1*03:03L HLA-DRB1*15:03L
  source 1..10: note = Severe acute respiratory syndrome coronavirus 2
YHDVRVVLDF

SEQ ID NO: 18959 - protein, 13 aa, Severe acute respiratory syndrome-related coronavirus
  REGION 1..13: note = Table B: HLA-DQA1*01:02-B1*06:02L HLA-DQA1*01:01-B1*05:01L HLA-DQA1*05:01-B1*02:01L
  source 1..13: note = Severe acute respiratory syndrome coronavirus 2
DSTGSNQNGERSG

SEQ ID NO: 18960 - protein, 12 aa, Severe acute respiratory syndrome-related coronavirus
  REGION 1..12: note = Table B: HLA-DQA1*01:02-B1*06:02L HLA-DPA1*01:03-B1*03:01L HLA-DQA1*05:05-B1*03:19L HLA-DQA1*02:01-B1*03:03L
  source 1..12: note = Severe acute respiratory syndrome coronavirus 2
RPQGLPNNTASW

SEQ ID NO: 18961 - protein, 10 aa, Severe acute respiratory syndrome-related coronavirus
  REGION 1..10: note = Table B: HLA-DQA1*01:02-B1*06:02L HLA-DQA1*02:01-B1*03:03L
  source 1..10: note = Severe acute respiratory syndrome coronavirus 2
GLPNNTASWF

SEQ ID NO: 18962 - protein, 12 aa, Severe acute respiratory syndrome-related coronavirus
  REGION 1..12: note = Table B: HLA-DQA1*01:02-B1*06:02L
  source 1..12: note = Severe acute respiratory syndrome coronavirus 2
LPNNTASWFTAL

SEQ ID NO: 18963 - protein, 12 aa, Severe acute respiratory syndrome-related coronavirus
  REGION 1..12: note = Table B: HLA-DQA1*01:02-B1*06:02L
  source 1..12: note = Severe acute respiratory syndrome coronavirus 2
PNNTASWFTALT

SEQ ID NO: 18964 - protein, 12 aa, Severe acute respiratory syndrome-related coronavirus
  REGION 1..12: note = Table B: HLA-DQA1*01:02-B1*06:02L
  source 1..12: note = Severe acute respiratory syndrome coronavirus 2
NTASWFTALTQH

SEQ ID NO: 18965 - protein, 14 aa, Severe acute respiratory syndrome-related coronavirus
  REGION 1..14: note = Table B: HLA-DQA1*01:02-B1*06:02L HLA-DRB1*12:01L HLA-DQA1*01:03-B1*06:01L HLA-DRB1*15:03L
  source 1..14: note = Severe acute respiratory syndrome coronavirus 2
EDLKFPRGQGVPIN

SEQ ID NO: 18966 - protein, 11 aa, Severe acute respiratory syndrome-related coronavirus
  REGION 1..11: note = Table B: HLA-DQA1*01:02-B1*06:02L
  source 1..11: note = Severe acute respiratory syndrome coronavirus 2
DGKMKDLSPRW

SEQ ID NO: 18967 - protein, 10 aa, Severe acute respiratory syndrome-related coronavirus
  REGION 1..10: note = Table B: HLA-DQA1*01:02-B1*06:02M HLA-DPA1*01:03-B1*03:01L HLA-DRB1*03:01L HLA-DRB1*11:02L HLA-DRB1*14:02L HLA-DQA1*01-B1*05L HLA-DQA1*05:05-B1*03:19M HLA-DQA1*05:01-B1*02:01L HLA-DRB4*01:01L
  REGION 1..10: note = CONT. FROM ABOVE: HLA-DPA1*01:03-B1*04:01L HLA-DPA1*03:01-B1*105 :01L HLA-DPA1*01:03-B1*104:01L HLA-DRB1*16:01L HLA-DQA1*02:01-B1 *03:03L
  source 1..10: note = Severe acute respiratory syndrome coronavirus 2
DLSPRWYFYY

SEQ ID NO: 18968 - protein, 12 aa, Severe acute respiratory syndrome-related coronavirus
  REGION 1..12: note = Table B: HLA-DQA1*01:02-B1*06:02L HLA-DQA1*05:05-B1*03:19L HLA-DPA1*03:01-B1*105:01L HLA-DQA1*05:05-B1*03:01L HLA-DRB1*10:01L
  source 1..12: note = Severe acute respiratory syndrome coronavirus 2
YFYYLGTGPEAG

SEQ ID NO: 18969 - protein, 13 aa, Severe acute respiratory syndrome-related coronavirus
  REGION 1..13: note = Table B: HLA-DQA1*01:02-B1*06:02L HLA-DPA1*03:01-B1*105:01L HLA-DQA1*01:03-B1*06:01L
  source 1..13: note = Severe acute respiratory syndrome coronavirus 2
FYYLGTGPEAGLP

SEQ ID NO: 18970 - protein, 11 aa, Severe acute respiratory syndrome-related coronavirus
  REGION 1..11: note = Table B: HLA-DQA1*01:02-B1*06:02L HLA-DQA1*05:01-B1*02:01L HLA-DQA1*03:01-B1*03:02L HLA-DRB1*04:08L
  source 1..11: note = Severe acute respiratory syndrome coronavirus 2
GPEAGLPYGAN

SEQ ID NO: 18971 - protein, 12 aa, Severe acute respiratory syndrome-related coronavirus
  REGION 1..12: note = Table B: HLA-DQA1*01:02-B1*06:02L
  source 1..12: note = Severe acute respiratory syndrome coronavirus 2
PEAGLPYGANKD

SEQ ID NO: 18972 - protein, 10 aa, Severe acute respiratory syndrome-related coronavirus
  REGION 1..10: note = Table B: HLA-DQA1*01:02-B1*06:02L
  source 1..10: note = Severe acute respiratory syndrome coronavirus 2
YGANKDGIIW

SEQ ID NO: 18973 - protein, 12 aa, Severe acute respiratory syndrome-related coronavirus
  REGION 1..12: note = Table B: HLA-DQA1*01:02-B1*06:02L HLA-DQA1*05:05-B1*03:01L HLA-DQA1*01:03-B1*06:01L
  source 1..12: note = Severe acute respiratory syndrome coronavirus 2
GANKDGIIWVAT

SEQ ID NO: 18974 - protein, 12 aa, Severe acute respiratory syndrome-related coronavirus
  REGION 1..12: note = Table B: HLA-DQA1*01:02-B1*06:02L HLA-DPA1*03:01-B1*105:01L HLA-DQA1*05:05-B1*03:01L HLA-DQA1*02:01-B1*03:03L
  source 1..12: note = Severe acute respiratory syndrome coronavirus 2
ANKDGIIWVATE

SEQ ID NO: 18975 - protein, 14 aa, Severe acute respiratory syndrome-related coronavirus
  REGION 1..14: note = Table B: HLA-DQA1*01:02-B1*06:02L HLA-DPA1*01:03-B1*03:01L HLA-DPA1*02:01-B1*13:01L HLA-DQA1*05:05-B1*03:01L HLA-DQA1*01:03-B1*06:01L
  source 1..14: note = Severe acute respiratory syndrome coronavirus 2
GTRNPANNAAIVLQ

SEQ ID NO: 18976 - protein, 13 aa, Severe acute respiratory syndrome-related coronavirus
  REGION 1..13: note = Table B: HLA-DQA1*01:02-B1*06:02L HLA-DQA1*01:03-B1*06:01L
  source 1..13: note = Severe acute respiratory syndrome coronavirus 2
NPANNAAIVLQLP

SEQ ID NO: 18977 - protein, 12 aa, Severe acute respiratory syndrome-related coronavirus
  REGION 1..12: note = Table B: HLA-DQA1*01:02-B1*06:02L
  source 1..12: note = Severe acute respiratory syndrome coronavirus 2
ANNAAIVLQLPQ

SEQ ID NO: 18978 - protein, 10 aa, Severe acute respiratory syndrome-related coronavirus
  REGION 1..10: note = Table B: HLA-DQA1*01:02-B1*06:02L HLA-DPA1*02:01-B1*13:01L HLA-DQA1*01:03-B1*06:01L HLA-DQA1*02:01-B1*03:03L
  source 1..10: note = Severe acute respiratory syndrome coronavirus 2
PQGTTLPKGF

SEQ ID NO: 18979 - protein, 10 aa, Severe acute respiratory syndrome-related coronavirus
  REGION 1..10: note = Table B: HLA-DQA1*01:02-B1*06:02L HLA-DQA1*05:05-B1*03:19L
  source 1..10: note = Severe acute respiratory syndrome coronavirus 2
QGTTLPKGFY

SEQ ID NO: 18980 - protein, 14 aa, Severe acute respiratory syndrome-related coronavirus
  REGION 1..14: note = Table B: HLA-DQA1*01:02-B1*06:02L
  source 1..14: note = Severe acute respiratory syndrome coronavirus 2
RNSSRNSTPGSSRG

SEQ ID NO: 18981 - protein, 16 aa, Severe acute respiratory syndrome-related coronavirus
  REGION 1..16: note = Table B: HLA-DQA1*01:02-B1*06:02L HLA-DQA1*01:03-B1*06:01L
  source 1..16: note = Severe acute respiratory syndrome coronavirus 2
NSSRNSTPGSSRGTSP

SEQ ID NO: 18982 - protein, 13 aa, Severe acute respiratory syndrome-related coronavirus
  REGION 1..13: note = Table B: HLA-DQA1*01:02-B1*06:02L HLA-DRB1*14:54L HLA-DQA1*01:03-B1*06:01L HLA-DRB1*04:08L
  source 1..13: note = Severe acute respiratory syndrome coronavirus 2
NSTPGSSRGTSPA

SEQ ID NO: 18983 - protein, 14 aa, Severe acute respiratory syndrome-related coronavirus
  REGION 1..14: note = Table B: HLA-DQA1*01:02-B1*06:02L HLA-DQA1*05:05-B1*03:19L HLA-DQA1*01:03-B1*06:01L
  source 1..14: note = Severe acute respiratory syndrome coronavirus 2
TPGSSRGTSPARMA

SEQ ID NO: 18984 - protein, 13 aa, Severe acute respiratory syndrome-related coronavirus
  REGION 1..13: note = Table B: HLA-DQA1*01:02-B1*06:02L HLA-DQA1*01:03-B1*06:01L
  source 1..13: note = Severe acute respiratory syndrome coronavirus 2
SRGTSPARMAGNG

SEQ ID NO: 18985 - protein, 14 aa, Severe acute respiratory syndrome-related coronavirus
  REGION 1..14: note = Table B: HLA-DQA1*01:02-B1*06:02L
  source 1..14: note = Severe acute respiratory syndrome coronavirus 2
RMAGNGGDAALALL

SEQ ID NO: 18986 - protein, 12 aa, Severe acute respiratory syndrome-related coronavirus
  REGION 1..12: note = Table B: HLA-DQA1*01:02-B1*06:02L HLA-DQA1*05:01-B1*02:01L HLA-DQA1*01:03-B1*06:01L HLA-DRB1*15:03L
  source 1..12: note = Severe acute respiratory syndrome coronavirus 2
AALALLLLDRLN

SEQ ID NO: 18987 - protein, 14 aa, Severe acute respiratory syndrome-related coronavirus
  REGION 1..14: note = Table B: HLA-DQA1*01:02-B1*06:02L
  source 1..14: note = Severe acute respiratory syndrome coronavirus 2
ESKMSGKGQQQQGQ

SEQ ID NO: 18988 - protein, 15 aa, Severe acute respiratory syndrome-related coronavirus
  REGION 1..15: note = Table B: HLA-DQA1*01:02-B1*06:02L
  source 1..15: note = Severe acute respiratory syndrome coronavirus 2
GKGQQQQGQTVTKKS

SEQ ID NO: 18989 - protein, 14 aa, Severe acute respiratory syndrome-related coronavirus
  REGION 1..14: note = Table B: HLA-DQA1*01:02-B1*06:02L HLA-DQA1*01:03-B1*06:01L
  source 1..14: note = Severe acute respiratory syndrome coronavirus 2
GQQQQGQTVTKKSA

SEQ ID NO: 18990 - protein, 13 aa, Severe acute respiratory syndrome-related coronavirus
  REGION 1..13: note = Table B: HLA-DQA1*01:02-B1*06:02L
  source 1..13: note = Severe acute respiratory syndrome coronavirus 2
QQGQTVTKKSAAE

SEQ ID NO: 18991 - protein, 14 aa, Severe acute respiratory syndrome-related coronavirus
  REGION 1..14: note = Table B: HLA-DQA1*01:02-B1*06:02L
  source 1..14: note = Severe acute respiratory syndrome coronavirus 2
QGQTVTKKSAAEAS

SEQ ID NO: 18992 - protein, 14 aa, Severe acute respiratory syndrome-related coronavirus
  REGION 1..14: note = Table B: HLA-DQA1*01:02-B1*06:02L HLA-DRB1*04:08L
  source 1..14: note = Severe acute respiratory syndrome coronavirus 2
TKKSAAEASKKPRQ

SEQ ID NO: 18993 - protein, 11 aa, Severe acute respiratory syndrome-related coronavirus
  REGION 1..11: note = Table B: HLA-DQA1*01:02-B1*06:02L HLA-DQA1*02:01-B1*03:03L
  source 1..11: note = Severe acute respiratory syndrome coronavirus 2
DQELIRQGTDY

SEQ ID NO: 18994 - protein, 13 aa, Severe acute respiratory syndrome-related coronavirus
  REGION 1..13: note = Table B: HLA-DQA1*01:02-B1*06:02L HLA-DQA1*05:05-B1*03:01L HLA-DQA1*01:03-B1*06:01L
  source 1..13: note = Severe acute respiratory syndrome coronavirus 2
HWPQIAQFAPSAS

SEQ ID NO: 18995 - protein, 12 aa, Severe acute respiratory syndrome-related coronavirus
  REGION 1..12: note = Table B: HLA-DQA1*01:02-B1*06:02L HLA-DQA1*05:05-B1*03:01L HLA-DQA1*01:03-B1*06:01L
  source 1..12: note = Severe acute respiratory syndrome coronavirus 2
FAPSASAFFGMS

SEQ ID NO: 18996 - protein, 12 aa, Severe acute respiratory syndrome-related coronavirus
  REGION 1..12: note = Table B: HLA-DQA1*01:02-B1*06:02L HLA-DPA1*03:01-B1*105:01L
  source 1..12: note = Severe acute respiratory syndrome coronavirus 2
SASAFFGMSRIG

SEQ ID NO: 18997 - protein, 10 aa, Severe acute respiratory syndrome-related coronavirus
  REGION 1..10: note = Table B: HLA-DQA1*01:02-B1*06:02L HLA-DQA1*01:03-B1*06:01L
  source 1..10: note = Severe acute respiratory syndrome coronavirus 2
AFFGMSRIGM

SEQ ID NO: 18998 - protein, 14 aa, Severe acute respiratory syndrome-related coronavirus
  REGION 1..14: note = Table B: HLA-DQA1*01:02-B1*06:02L
  source 1..14: note = Severe acute respiratory syndrome coronavirus 2
FFGMSRIGMEVTPS

SEQ ID NO: 18999 - protein, 10 aa, Severe acute respiratory syndrome-related coronavirus
  REGION 1..10: note = Table B: HLA-DQA1*01:02-B1*06:02L HLA-DQA1*05:05-B1*03:19L HLA-DQA1*05:01-B1*02:01L
  source 1..10: note = Severe acute respiratory syndrome coronavirus 2
GMEVTPSGTW

SEQ ID NO: 19000 - protein, 13 aa, Severe acute respiratory syndrome-related coronavirus
  REGION 1..13: note = Table B: HLA-DQA1*01:02-B1*06:02L
  source 1..13: note = Severe acute respiratory syndrome coronavirus 2
PSGTWLTYTGAIK

SEQ ID NO: 19001 - protein, 13 aa, Severe acute respiratory syndrome-related coronavirus
  REGION 1..13: note = Table B: HLA-DQA1*01:02-B1*06:02L HLA-DRB1*14:01L HLA-DRB1*14:02L HLA-DQA1*05:05-B1*03:19L HLA-DRB1*15:01L
  source 1..13: note = Severe acute respiratory syndrome coronavirus 2
GTWLTYTGAIKLD

SEQ ID NO: 19002 - protein, 12 aa, Severe acute respiratory syndrome-related coronavirus
  REGION 1..12: note = Table B: HLA-DQA1*01:02-B1*06:02L HLA-DQA1*05:05-B1*03:19L HLA-DQA1*05:05-B1*03:01L
  source 1..12: note = Severe acute respiratory syndrome coronavirus 2
WLTYTGAIKLDD

SEQ ID NO: 19003 - protein, 12 aa, Severe acute respiratory syndrome-related coronavirus
  REGION 1..12: note = Table B: HLA-DQA1*01:02-B1*06:02L
  source 1..12: note = Severe acute respiratory syndrome coronavirus 2
YTGAIKLDDKDP

SEQ ID NO: 19004 - protein, 13 aa, Severe acute respiratory syndrome-related coronavirus
  REGION 1..13: note = Table B: HLA-DQA1*01:02-B1*06:02L HLA-DQA1*01-B1*05L HLA-DPA1*02:01-B1*13:01L HLA-DPA1*03:01-B1*105:01L
  source 1..13: note = Severe acute respiratory syndrome coronavirus 2
IKLDDKDPNFKDQ

SEQ ID NO: 19005 - protein, 15 aa, Severe acute respiratory syndrome-related coronavirus
  REGION 1..15: note = Table B: HLA-DQA1*01:02-B1*06:02L HLA-DPA1*03:01-B1*105:01L HLA-DRB1*15:03L
  source 1..15: note = Severe acute respiratory syndrome coronavirus 2
DDKDPNFKDQVILLN

SEQ ID NO: 19006 - protein, 12 aa, Severe acute respiratory syndrome-related coronavirus
  REGION 1..12: note = Table B: HLA-DQA1*01:02-B1*06:02L
  source 1..12: note = Severe acute respiratory syndrome coronavirus 2
KADETQALPQRQ

SEQ ID NO: 19007 - protein, 12 aa, Severe acute respiratory syndrome-related coronavirus
  REGION 1..12: note = Table B: HLA-DQA1*01:02-B1*06:02L
  source 1..12: note = Severe acute respiratory syndrome coronavirus 2
TQALPQRQKKQQ

SEQ ID NO: 19008 - protein, 10 aa, Severe acute respiratory syndrome-related coronavirus
  REGION 1..10: note = Table B: HLA-DQA1*01:02-B1*06:02L HLA-DQA1*03:01-B1*03:02L HLA-DQA1*01:03-B1*06:01L HLA-DQA1*02:01-B1*03:03L
  source 1..10: note = Severe acute respiratory syndrome coronavirus 2
QTVTLLPAAD

SEQ ID NO: 19009 - protein, 10 aa, Severe acute respiratory syndrome-related coronavirus
  REGION 1..10: note = Table B: HLA-DQA1*01:02-B1*06:02L HLA-DQA1*05:01-B1*02:01L
  source 1..10: note = Severe acute respiratory syndrome coronavirus 2
LLPAADLDDF

SEQ ID NO: 19010 - protein, 14 aa, Severe acute respiratory syndrome-related coronavirus
  REGION 1..14: note = Table B: HLA-DQA1*01:02-B1*06:02L HLA-DRB1*01:02L HLA-DPA1*02:01-B1*13:01L HLA-DRB1*15:03L
  source 1..14: note = Severe acute respiratory syndrome coronavirus 2
LPAADLDDFSKQLQ

SEQ ID NO: 19011 - protein, 12 aa, Severe acute respiratory syndrome-related coronavirus
  REGION 1..12: note = Table B: HLA-DQA1*01:02-B1*06:02L HLA-DPA1*03:01-B1*105:01L
  source 1..12: note = Severe acute respiratory syndrome coronavirus 2
LDDFSKQLQQSM

SEQ ID NO: 19012 - protein, 12 aa, Severe acute respiratory syndrome-related coronavirus
  REGION 1..12: note = Table B: HLA-DQA1*01:02-B1*06:02L HLA-DQA1*05:05-B1*03:19L HLA-DPA1*03:01-B1*105:01L HLA-DQA1*05:05-B1*03:01L
  source 1..12: note = Severe acute respiratory syndrome coronavirus 2
DDFSKQLQQSMS

SEQ ID NO: 19013 - protein, 14 aa, Severe acute respiratory syndrome-related coronavirus
  REGION 1..14: note = Table B: HLA-DQA1*01:02-B1*06:02L HLA-DPA1*01:03-B1*03:01L HLA-DPA1*02:01-B1*13:01L HLA-DQA1*05:05-B1*03:01L HLA-DQA1*02:01-B1*03:03L
  source 1..14: note = Severe acute respiratory syndrome coronavirus 2
DFSKQLQQSMSSAD

SEQ ID NO: 19014 - protein, 14 aa, Severe acute respiratory syndrome-related coronavirus
  REGION 1..14: note = Table B: HLA-DQA1*01:02-B1*06:02L HLA-DQA1*05:05-B1*03:01L
  source 1..14: note = Severe acute respiratory syndrome coronavirus 2
FSKQLQQSMSSADS

SEQ ID NO: 19015 - protein, 16 aa, Severe acute respiratory syndrome-related coronavirus
  REGION 1..16: note = Table B: HLA-DQA1*01:02-B1*06:02L HLA-DRB1*16:01L HLA-DRB1*04:08L
  source 1..16: note = Severe acute respiratory syndrome coronavirus 2
FPFTIYSLLLCRMNSR

SEQ ID NO: 19016 - protein, 12 aa, Severe acute respiratory syndrome-related coronavirus
  REGION 1..12: note = Table B: HLA-DQA1*01:02-B1*06:02L
  source 1..12: note = Severe acute respiratory syndrome coronavirus 2
YSLLLCRMNSRN

SEQ ID NO: 19017 - protein, 12 aa, Severe acute respiratory syndrome-related coronavirus
  REGION 1..12: note = Table B: HLA-DQA1*01:02-B1*06:02L
  source 1..12: note = Severe acute respiratory syndrome coronavirus 2
SLLLCRMNSRNY

SEQ ID NO: 19018 - protein, 14 aa, Severe acute respiratory syndrome-related coronavirus
  REGION 1..14: note = Table B: HLA-DRB1*01:01L HLA-DRB1*08:01L HLA-DRB3*01:01L HLA-DRB1*08:03L
  source 1..14: note = Severe acute respiratory syndrome coronavirus 2
TRELMRELNGGAYT

SEQ ID NO: 19019 - protein, 15 aa, Severe acute respiratory syndrome-related coronavirus
  REGION 1..15: note = Table B: HLA-DRB1*01:01L HLA-DQA1*01-B1*05L HLA-DPA1*02:01-B1*13:01L HLA-DQA1*05:05-B1*03:01L HLA-DRB1*10:01L HLA-DQA1*01:03-B1*06:01L
  source 1..15: note = Severe acute respiratory syndrome coronavirus 2
GYPLECIKDLLARAG

SEQ ID NO: 19020 - protein, 15 aa, Severe acute respiratory syndrome-related coronavirus
  REGION 1..15: note = Table B: HLA-DRB1*01:01L
  source 1..15: note = Severe acute respiratory syndrome coronavirus 2
IRSVYPVASPNECNQ

SEQ ID NO: 19021 - protein, 18 aa, Severe acute respiratory syndrome-related coronavirus
  REGION 1..18: note = Table B: HLA-DRB1*01:01L HLA-DRB1*04:08L
  source 1..18: note = Severe acute respiratory syndrome coronavirus 2
GTENLTKEGATTCGYLPQ

SEQ ID NO: 19022 - protein, 13 aa, Severe acute respiratory syndrome-related coronavirus
  REGION 1..13: note = Table B: HLA-DRB1*01:01L HLA-DRB1*14:02L HLA-DQA1*05:05-B1*03:01L
  source 1..13: note = Severe acute respiratory syndrome coronavirus 2
AEYHNESGLKTIL

SEQ ID NO: 19023 - protein, 14 aa, Severe acute respiratory syndrome-related coronavirus
  REGION 1..14: note = Table B: HLA-DRB1*01:01L HLA-DRB3*02:01L HLA-DRB1*11:04L HLA-DRB5*01:01L HLA-DRB1*09:01L HLA-DPA1*01:03-B1*04:02L HLA-DPA1*02:01-B1*13:01L HLA-DPA1*01:03-B1*104:01L
  source 1..14: note = Severe acute respiratory syndrome coronavirus 2
TGVVGEGSEGLNDN

SEQ ID NO: 19024 - protein, 16 aa, Severe acute respiratory syndrome-related coronavirus
  REGION 1..16: note = Table B: HLA-DRB1*01:01L
  source 1..16: note = Severe acute respiratory syndrome coronavirus 2
NDNLLEILQKEKVNIN

SEQ ID NO: 19025 - protein, 13 aa, Severe acute respiratory syndrome-related coronavirus
  REGION 1..13: note = Table B: HLA-DRB1*01:01L HLA-DRB1*08:04L HLA-DPA1*01:03-B1*03:01L HLA-DPA1*03:01-B1*04:02L HLA-DRB1*14:01L HLA-DRB1*11:04L HLA-DRB5*01:01L HLA-DQA1*01-B1*05L HLA-DRB1*04:10L HLA-DRB1*14:54L
  REGION 1..13: note = CONT. FROM ABOVE: HLA-DRB1*10:01L HLA-DRB1*04:08L HLA-DRB1*08:03 L
  source 1..13: note = Severe acute respiratory syndrome coronavirus 2
LASFSASTSAFVE

SEQ ID NO: 19026 - protein, 13 aa, Severe acute respiratory syndrome-related coronavirus
  REGION 1..13: note = Table B: HLA-DRB1*01:01L HLA-DRB1*14:01L HLA-DRB1*14:54L HLA-DRB1*10:01L HLA-DRB1*04:08L
  source 1..13: note = Severe acute respiratory syndrome coronavirus 2
ASFSASTSAFVET

SEQ ID NO: 19027 - protein, 13 aa, Severe acute respiratory syndrome-related coronavirus
  REGION 1..13: note = Table B: HLA-DRB1*01:01L HLA-DRB1*12:02L HLA-DPA1*01:03-B1*02:01L HLA-DRB1*07:01L
  source 1..13: note = Severe acute respiratory syndrome coronavirus 2
SAFVETVKGLDYK

SEQ ID NO: 19028 - protein, 16 aa, Severe acute respiratory syndrome-related coronavirus
  REGION 1..16: note = Table B: HLA-DRB1*01:01L HLA-DRB1*03:01L HLA-DRB1*11:02L HLA-DPA1*01:03-B1*04:02L HLA-DPA1*01:03-B1*02:01L
  source 1..16: note = Severe acute respiratory syndrome coronavirus 2
NSVRVLQKAAITILDG

SEQ ID NO: 19029 - protein, 14 aa, Severe acute respiratory syndrome-related coronavirus
  REGION 1..14: note = Table B: HLA-DRB1*01:01L HLA-DRB1*10:01L
  source 1..14: note = Severe acute respiratory syndrome coronavirus 2
LTNIFGTVYEKLKP

SEQ ID NO: 19030 - protein, 16 aa, Severe acute respiratory syndrome-related coronavirus
  REGION 1..16: note = Table B: HLA-DRB1*01:01L HLA-DRB3*02:01L HLA-DRB1*11:02L HLA-DRB1*14:02L HLA-DPA1*01:03-B1*02:01L HLA-DRB1*08:03L
  source 1..16: note = Severe acute respiratory syndrome coronavirus 2
EEKFKEGVEFLRDGWE

SEQ ID NO: 19031 - protein, 17 aa, Severe acute respiratory syndrome-related coronavirus
  REGION 1..17: note = Table B: HLA-DRB1*01:01L HLA-DRB1*11:02L HLA-DRB1*11:01L HLA-DPA1*01:03-B1*02:01L HLA-DRB1*08:02L
  source 1..17: note = Severe acute respiratory syndrome coronavirus 2
APTKVTFGDDTVIEVQG

SEQ ID NO: 19032 - protein, 12 aa, Severe acute respiratory syndrome-related coronavirus
  REGION 1..12: note = Table B: HLA-DRB1*01:01L HLA-DRB1*11:01L HLA-DRB4*02:01NL HLA-DRB4*01:01L HLA-DPA1*01:03-B1*04:01L HLA-DPA1*01:03-B1*04:02L HLA-DPA1*01:03-B1*104:01L
  source 1..12: note = Severe acute respiratory syndrome coronavirus 2
DAVIKTLQPVSE

SEQ ID NO: 19033 - protein, 14 aa, Severe acute respiratory syndrome-related coronavirus
  REGION 1..14: note = Table B: HLA-DRB1*01:01L
  source 1..14: note = Severe acute respiratory syndrome coronavirus 2
YEYGTEDDYQGKPL

SEQ ID NO: 19034 - protein, 14 aa, Severe acute respiratory syndrome-related coronavirus
  REGION 1..14: note = Table B: HLA-DRB1*01:01L HLA-DRB1*03:01L
  source 1..14: note = Severe acute respiratory syndrome coronavirus 2
VYIKNADIVEEAKK

SEQ ID NO: 19035 - protein, 15 aa, Severe acute respiratory syndrome-related coronavirus
  REGION 1..15: note = Table B: HLA-DRB1*01:01L HLA-DPA1*01:03-B1*02:01L HLA-DRB1*07:01L
  source 1..15: note = Severe acute respiratory syndrome coronavirus 2
EQKIAEIPKEEVKPF

SEQ ID NO: 19036 - protein, 14 aa, Severe acute respiratory syndrome-related coronavirus
  REGION 1..14: note = Table B: HLA-DRB1*01:01L HLA-DQA1*05:05-B1*03:19L HLA-DRB4*02:01NL HLA-DRB4*01:01L HLA-DPA1*01:03-B1*04:01L HLA-DPA1*01:03-B1*04:02L HLA-DQA1*05:05-B1*03:01L
  source 1..14: note = Severe acute respiratory syndrome coronavirus 2
INGNLHPDSATLVS

SEQ ID NO: 19037 - protein, 14 aa, Severe acute respiratory syndrome-related coronavirus
  REGION 1..14: note = Table B: HLA-DRB1*01:01L HLA-DRB3*02:01L HLA-DRB1*11:02L HLA-DRB1*11:03L HLA-DQA1*01:01-B1*05:01L HLA-DRB1*08:01L HLA-DRB1*11:01L HLA-DRB5*01:01L HLA-DRB1*13:01L HLA-DQA1*05:05-B1*03:116L HLA-DRB1*09:01L HLA-DRB3*01:01L
  REGION 1..14: note = CONT. FROM ABOVE: HLA-DPA1*01:03-B1*02:01L HLA-DRB1*07:01L HLA-D RB1*08:02L HLA-DRB1*08:03L
  source 1..14: note = Severe acute respiratory syndrome coronavirus 2
APYIVGDVVQEGVL

SEQ ID NO: 19038 - protein, 12 aa, Severe acute respiratory syndrome-related coronavirus
  REGION 1..12: note = Table B: HLA-DRB1*01:01L HLA-DPA1*01:03-B1*03:01L HLA-DRB1*11:04L HLA-DPA1*01:03-B1*04:01L HLA-DPA1*01:03-B1*04:02L HLA-DPA1*02:01-B1*13:01L HLA-DRB1*10:01L HLA-DRB1*08:03L
  source 1..12: note = Severe acute respiratory syndrome coronavirus 2
NYITTYPGQGLN

SEQ ID NO: 19039 - protein, 16 aa, Severe acute respiratory syndrome-related coronavirus
  REGION 1..16: note = Table B: HLA-DRB1*01:01L HLA-DRB3*01:01L HLA-DRB1*07:01L
  source 1..16: note = Severe acute respiratory syndrome coronavirus 2
SPDAVTAYNGYLTSSS

SEQ ID NO: 19040 - protein, 15 aa, Severe acute respiratory syndrome-related coronavirus
  REGION 1..15: note = Table B: HLA-DRB1*01:01L HLA-DRB1*08:04L HLA-DPA1*01:03-B1*03:01L HLA-DPA1*03:01-B1*04:02L HLA-DRB1*14:02L HLA-DRB1*11:01L HLA-DPA1*01:03-B1*04:02L HLA-DPA1*02:01-B1*13:01L
  source 1..15: note = Severe acute respiratory syndrome coronavirus 2
VTAYNGYLTSSSKTP

SEQ ID NO: 19041 - protein, 15 aa, Severe acute respiratory syndrome-related coronavirus
  REGION 1..15: note = Table B: HLA-DRB1*01:01L
  source 1..15: note = Severe acute respiratory syndrome coronavirus 2
LLSLREVRTIKVFTT

SEQ ID NO: 19042 - protein, 15 aa, Severe acute respiratory syndrome-related coronavirus
  REGION 1..15: note = Table B: HLA-DRB1*01:01L
  source 1..15: note = Severe acute respiratory syndrome coronavirus 2
DGADVTKIKPHNSHE

SEQ ID NO: 19043 - protein, 13 aa, Severe acute respiratory syndrome-related coronavirus
  REGION 1..13: note = Table B: HLA-DRB1*01:01L HLA-DRB1*08:04L HLA-DRB1*11:04L HLA-DRB1*11:01L HLA-DRB3*01:01L HLA-DRB1*07:01L HLA-DRB1*08:03L
  source 1..13: note = Severe acute respiratory syndrome coronavirus 2
KTFYVLPNDDTLR

SEQ ID NO: 19044 - protein, 15 aa, Severe acute respiratory syndrome-related coronavirus
  REGION 1..15: note = Table B: HLA-DRB1*01:01L HLA-DRB1*11:03L HLA-DRB1*08:03L
  source 1..15: note = Severe acute respiratory syndrome coronavirus 2
DDTLRVEAFEYYHTT

SEQ ID NO: 19045 - protein, 16 aa, Severe acute respiratory syndrome-related coronavirus
  REGION 1..16: note = Table B: HLA-DRB1*01:01L HLA-DRB1*07:01L
  source 1..16: note = Severe acute respiratory syndrome coronavirus 2
DPSFLGRYMSALNHTK

SEQ ID NO: 19046 - protein, 18 aa, Severe acute respiratory syndrome-related coronavirus
  REGION 1..18: note = Table B: HLA-DRB1*01:01L HLA-DRB1*11:02L
  source 1..18: note = Severe acute respiratory syndrome coronavirus 2
ATALLTLQQIELKFNPPA

SEQ ID NO: 19047 - protein, 15 aa, Severe acute respiratory syndrome-related coronavirus
  REGION 1..15: note = Table B: HLA-DRB1*01:01L HLA-DRB1*03:01L HLA-DRB4*01:01L HLA-DPA1*01:03-B1*02:01L HLA-DRB1*07:01L
  source 1..15: note = Severe acute respiratory syndrome coronavirus 2
LQQIELKFNPPALQD

SEQ ID NO: 19048 - protein, 14 aa, Severe acute respiratory syndrome-related coronavirus
  REGION 1..14: note = Table B: HLA-DRB1*01:01L HLA-DQA1*05:05-B1*03:01L HLA-DRB1*04:08L
  source 1..14: note = Severe acute respiratory syndrome coronavirus 2
YRARAGEAANFCAL

SEQ ID NO: 19049 - protein, 13 aa, Severe acute respiratory syndrome-related coronavirus
  REGION 1..13: note = Table B: HLA-DRB1*01:01L HLA-DRB1*11:03L HLA-DRB1*14:02L HLA-DPA1*01:03-B1*104:01L HLA-DQA1*05:05-B1*03:01L HLA-DRB1*10:01L
  source 1..13: note = Severe acute respiratory syndrome coronavirus 2
GTLSYEQFKKGVQ

SEQ ID NO: 19050 - protein, 12 aa, Severe acute respiratory syndrome-related coronavirus
  REGION 1..12: note = Table B: HLA-DRB1*01:01L
  source 1..12: note = Severe acute respiratory syndrome coronavirus 2
PFVMMSAPPAQY

SEQ ID NO: 19051 - protein, 12 aa, Severe acute respiratory syndrome-related coronavirus
  REGION 1..12: note = Table B: HLA-DRB1*01:01L HLA-DRB1*08:04L HLA-DRB3*02:01L HLA-DRB1*11:03L HLA-DRB1*11:04L
  source 1..12: note = Severe acute respiratory syndrome coronavirus 2
FVMMSAPPAQYE

SEQ ID NO: 19052 - protein, 15 aa, Severe acute respiratory syndrome-related coronavirus
  REGION 1..15: note = Table B: HLA-DRB1*01:01L HLA-DRB1*13:01L
  source 1..15: note = Severe acute respiratory syndrome coronavirus 2
TGNYQCGHYKHITSK

SEQ ID NO: 19053 - protein, 15 aa, Severe acute respiratory syndrome-related coronavirus
  REGION 1..15: note = Table B: HLA-DRB1*01:01L
  source 1..15: note = Severe acute respiratory syndrome coronavirus 2
TDVFYKENSYTTTIK

SEQ ID NO: 19054 - protein, 14 aa, Severe acute respiratory syndrome-related coronavirus
  REGION 1..14: note = Table B: HLA-DRB1*01:01L HLA-DRB1*07:01L
  source 1..14: note = Severe acute respiratory syndrome coronavirus 2
DLNQLTGYKKPASR

SEQ ID NO: 19055 - protein, 14 aa, Severe acute respiratory syndrome-related coronavirus
  REGION 1..14: note = Table B: HLA-DRB1*01:01L HLA-DRB1*03:01L HLA-DRB1*14:02L HLA-DQA1*05:05-B1*03:19L HLA-DRB1*13:01L HLA-DQA1*05:05-B1*03:116L HLA-DPA1*01:03-B1*04:02L HLA-DPA1*03:01-B1*105:01L HLA-DPA1*01:03-B1*02:01L
  REGION 1..14: note = CONT. FROM ABOVE: HLA-DQA1*05:05-B1*03:01L HLA-DRB1*07:01L HLA-D RB1*08:02L
  source 1..14: note = Severe acute respiratory syndrome coronavirus 2
LNQLTGYKKPASRE

SEQ ID NO: 19056 - protein, 15 aa, Severe acute respiratory syndrome-related coronavirus
  REGION 1..15: note = Table B: HLA-DRB1*01:01L HLA-DRB1*03:01L HLA-DRB1*07:01L
  source 1..15: note = Severe acute respiratory syndrome coronavirus 2
NQLTGYKKPASRELK

SEQ ID NO: 19057 - protein, 14 aa, Severe acute respiratory syndrome-related coronavirus
  REGION 1..14: note = Table B: HLA-DRB1*01:01L HLA-DRB1*11:02L HLA-DRB1*13:01L HLA-DPA1*01:03-B1*02:01L HLA-DRB1*07:01L HLA-DRB1*08:02L
  source 1..14: note = Severe acute respiratory syndrome coronavirus 2
KVTFFPDLNGDVVA

SEQ ID NO: 19058 - protein, 13 aa, Severe acute respiratory syndrome-related coronavirus
  REGION 1..13: note = Table B: HLA-DRB1*01:01L HLA-DRB4*02:01NL HLA-DRB1*09:01L HLA-DPA1*01:03-B1*104:01L HLA-DRB1*07:01L HLA-DRB1*08:02L HLA-DRB1*15:01L
  source 1..13: note = Severe acute respiratory syndrome coronavirus 2
DVVAIDYKHYTPS

SEQ ID NO: 19059 - protein, 14 aa, Severe acute respiratory syndrome-related coronavirus
  REGION 1..14: note = Table B: HLA-DRB1*01:01L HLA-DPA1*01:03-B1*104:01L HLA-DRB1*07:01L HLA-DRB1*08:02L
  source 1..14: note = Severe acute respiratory syndrome coronavirus 2
VVAIDYKHYTPSFK

SEQ ID NO: 19060 - protein, 14 aa, Severe acute respiratory syndrome-related coronavirus
  REGION 1..14: note = Table B: HLA-DRB1*01:01L
  source 1..14: note = Severe acute respiratory syndrome coronavirus 2
HKPIVWHVNNATNK

SEQ ID NO: 19061 - protein, 14 aa, Severe acute respiratory syndrome-related coronavirus
  REGION 1..14: note = Table B: HLA-DRB1*01:01L HLA-DRB1*08:04L HLA-DPA1*01:03-B1*03:01L HLA-DRB1*11:03L HLA-DRB1*14:02L HLA-DPA1*03:01-B1*105:01L
  source 1..14: note = Severe acute respiratory syndrome coronavirus 2
KPIVWHVNNATNKA

SEQ ID NO: 19062 - protein, 18 aa, Severe acute respiratory syndrome-related coronavirus
  REGION 1..18: note = Table B: HLA-DRB1*01:01L HLA-DRB1*07:01L
  source 1..18: note = Severe acute respiratory syndrome coronavirus 2
PIVWHVNNATNKATYKPN

SEQ ID NO: 19063 - protein, 12 aa, Severe acute respiratory syndrome-related coronavirus
  REGION 1..12: note = Table B: HLA-DRB1*01:01L HLA-DRB1*11:03L HLA-DRB1*11:04L HLA-DRB1*08:01L HLA-DRB1*11:01L HLA-DRB3*01:01L HLA-DRB1*07:01L HLA-DRB1*10:01L
  source 1..12: note = Severe acute respiratory syndrome coronavirus 2
SFNYLKSPNFSK

SEQ ID NO: 19064 - protein, 15 aa, Severe acute respiratory syndrome-related coronavirus
  REGION 1..15: note = Table B: HLA-DRB1*01:01L HLA-DRB1*11:03L HLA-DRB1*09:01L
  source 1..15: note = Severe acute respiratory syndrome coronavirus 2
ISSFKWDLTAFGLVA

SEQ ID NO: 19065 - protein, 11 aa, Severe acute respiratory syndrome-related coronavirus
  REGION 1..11: note = Table B: HLA-DRB1*01:01L HLA-DRB1*03:01L
  source 1..11: note = Severe acute respiratory syndrome coronavirus 2
FISDEVARDLS

SEQ ID NO: 19066 - protein, 13 aa, Severe acute respiratory syndrome-related coronavirus
  REGION 1..13: note = Table B: HLA-DRB1*01:01L HLA-DRB4*01:01L
  source 1..13: note = Severe acute respiratory syndrome coronavirus 2
QSSYIVDSVTVKN

SEQ ID NO: 19067 - protein, 14 aa, Severe acute respiratory syndrome-related coronavirus
  REGION 1..14: note = Table B: HLA-DRB1*01:01L HLA-DRB1*07:01L HLA-DRB1*08:03L
  source 1..14: note = Severe acute respiratory syndrome coronavirus 2
NGSIHLYFDKAGQK

SEQ ID NO: 19068 - protein, 12 aa, Severe acute respiratory syndrome-related coronavirus
  REGION 1..12: note = Table B: HLA-DRB1*01:01L HLA-DRB3*01:01L
  source 1..12: note = Severe acute respiratory syndrome coronavirus 2
HFVNLDNLRANN

SEQ ID NO: 19069 - protein, 15 aa, Severe acute respiratory syndrome-related coronavirus
  REGION 1..15: note = Table B: HLA-DRB1*01:01L HLA-DRB1*11:02L HLA-DQA1*01:01-B1*05:01L HLA-DRB1*08:01L HLA-DRB1*11:01L HLA-DRB5*01:01L HLA-DRB1*13:01L HLA-DPA1*01:03-B1*04:01L HLA-DRB1*09:01L HLA-DPA1*02:01-B1*13:01L
  REGION 1..15: note = CONT. FROM ABOVE: HLA-DPA1*01:03-B1*02:01L HLA-DPA1*01:03-B1*104 :01L HLA-DPA1*01:02-B1*04:01L HLA-DRB1*07:01L HLA-DRB1*08:02L HL A-DRB1*08:03L
  source 1..15: note = Severe acute respiratory syndrome coronavirus 2
QPILLLDQALVSDVG

SEQ ID NO: 19070 - protein, 12 aa, Severe acute respiratory syndrome-related coronavirus
  REGION 1..12: note = Table B: HLA-DRB1*01:01L HLA-DRB1*11:03L HLA-DPA1*01:03-B1*04:01L HLA-DRB1*09:01L HLA-DPA1*02:01-B1*13:01L HLA-DRB1*10:01L
  source 1..12: note = Severe acute respiratory syndrome coronavirus 2
TFSSTFNVPMEK

SEQ ID NO: 19071 - protein, 16 aa, Severe acute respiratory syndrome-related coronavirus
  REGION 1..16: note = Table B: HLA-DRB1*01:01L HLA-DRB3*02:01L HLA-DPA1*03:01-B1*04:02L HLA-DRB1*03:01L HLA-DRB1*11:01L HLA-DQA1*05:05-B1*03:19L HLA-DRB4*01:01L HLA-DRB3*01:01L HLA-DPA1*01:02-B1*04:01L
  source 1..16: note = Severe acute respiratory syndrome coronavirus 2
VPMEKLKTLVATAEAE

SEQ ID NO: 19072 - protein, 15 aa, Severe acute respiratory syndrome-related coronavirus
  REGION 1..15: note = Table B: HLA-DRB1*01:01L HLA-DRB5*01:01L
  source 1..15: note = Severe acute respiratory syndrome coronavirus 2
EAELAKNVSLDNVLS

SEQ ID NO: 19073 - protein, 16 aa, Severe acute respiratory syndrome-related coronavirus
  REGION 1..16: note = Table B: HLA-DRB1*01:01L HLA-DRB1*03:01L HLA-DRB1*13:01L HLA-DRB1*07:01L HLA-DRB1*08:02L
  source 1..16: note = Severe acute respiratory syndrome coronavirus 2
RKQIRSAAKKNNLPFK

SEQ ID NO: 19074 - protein, 15 aa, Severe acute respiratory syndrome-related coronavirus
  REGION 1..15: note = Table B: HLA-DRB1*01:01L HLA-DRB1*11:01L
  source 1..15: note = Severe acute respiratory syndrome coronavirus 2
DTWFSQRGGSYTNDK

SEQ ID NO: 19075 - protein, 14 aa, Severe acute respiratory syndrome-related coronavirus
  REGION 1..14: note = Table B: HLA-DRB1*01:01L HLA-DRB1*04:08L
  source 1..14: note = Severe acute respiratory syndrome coronavirus 2
LPRVFSAVGNICYT

SEQ ID NO: 19076 - protein, 15 aa, Severe acute respiratory syndrome-related coronavirus
  REGION 1..15: note = Table B: HLA-DRB1*01:01L
  source 1..15: note = Severe acute respiratory syndrome coronavirus 2
VGNICYTPSKLIEYT

SEQ ID NO: 19077 - protein, 12 aa, Severe acute respiratory syndrome-related coronavirus
  REGION 1..12: note = Table B: HLA-DRB1*01:01L HLA-DRB1*08:04L HLA-DPA1*03:01-B1*04:02L HLA-DRB1*11:03L HLA-DRB1*11:04L HLA-DRB1*14:02L HLA-DRB1*08:01L HLA-DRB1*04:10L HLA-DRB1*09:01L HLA-DRB1*12:02L HLA-DRB3*01:01L HLA-DRB1*10:01L
  source 1..12: note = Severe acute respiratory syndrome coronavirus 2
TIFKDASGKPVP

SEQ ID NO: 19078 - protein, 16 aa, Severe acute respiratory syndrome-related coronavirus
  REGION 1..16: note = Table B: HLA-DRB1*01:01L HLA-DRB1*11:03L HLA-DRB4*01:01L HLA-DRB1*09:01L HLA-DRB1*12:02L HLA-DRB3*01:01L HLA-DRB1*07:01L HLA-DRB1*08:02L HLA-DRB1*08:03L
  source 1..16: note = Severe acute respiratory syndrome coronavirus 2
DTNVLEGSVAYESLRP

SEQ ID NO: 19079 - protein, 13 aa, Severe acute respiratory syndrome-related coronavirus
  REGION 1..13: note = Table B: HLA-DRB1*01:01L HLA-DRB1*11:02L HLA-DRB1*11:01L HLA-DRB1*12:02L HLA-DRB3*01:01L HLA-DPA1*01:03-B1*02:01L HLA-DPA1*01:03-B1*104:01L
  source 1..13: note = Severe acute respiratory syndrome coronavirus 2
YVLMDGSIIQFPN

SEQ ID NO: 19080 - protein, 13 aa, Severe acute respiratory syndrome-related coronavirus
  REGION 1..13: note = Table B: HLA-DRB1*01:01L HLA-DRB1*11:02L HLA-DRB1*11:01L HLA-DRB3*01:01L HLA-DRB1*10:01L
  source 1..13: note = Severe acute respiratory syndrome coronavirus 2
DGSIIQFPNTYLE

SEQ ID NO: 19081 - protein, 14 aa, Severe acute respiratory syndrome-related coronavirus
  REGION 1..14: note = Table B: HLA-DRB1*01:01L HLA-DRB3*02:01L HLA-DPA1*02:01-B1*13:01L HLA-DPA1*01:03-B1*104:01L
  source 1..14: note = Severe acute respiratory syndrome coronavirus 2
PLIQPIGALDISAS

SEQ ID NO: 19082 - protein, 14 aa, Severe acute respiratory syndrome-related coronavirus
  REGION 1..14: note = Table B: HLA-DRB1*01:01L HLA-DRB3*01:01L HLA-DRB1*07:01L
  source 1..14: note = Severe acute respiratory syndrome coronavirus 2
TQYNRYLALYNKYK

SEQ ID NO: 19083 - protein, 14 aa, Severe acute respiratory syndrome-related coronavirus
  REGION 1..14: note = Table B: HLA-DRB1*01:01L HLA-DRB1*07:01L HLA-DRB1*15:01L
  source 1..14: note = Severe acute respiratory syndrome coronavirus 2
YNRYLALYNKYKYF

SEQ ID NO: 19084 - protein, 14 aa, Severe acute respiratory syndrome-related coronavirus
  REGION 1..14: note = Table B: HLA-DRB1*01:01L HLA-DRB1*14:02L
  source 1..14: note = Severe acute respiratory syndrome coronavirus 2
NKYKYFSGAMDTTS

SEQ ID NO: 19085 - protein, 14 aa, Severe acute respiratory syndrome-related coronavirus
  REGION 1..14: note = Table B: HLA-DRB1*01:01L HLA-DRB1*11:03L HLA-DRB1*11:01L HLA-DRB1*09:01L HLA-DRB3*01:01L HLA-DPA1*01:03-B1*02:01L HLA-DRB1*07:01L HLA-DRB1*08:03L
  source 1..14: note = Severe acute respiratory syndrome coronavirus 2
YKYFSGAMDTTSYR

SEQ ID NO: 19086 - protein, 15 aa, Severe acute respiratory syndrome-related coronavirus
  REGION 1..15: note = Table B: HLA-DRB1*01:01L HLA-DRB1*11:02L
  source 1..15: note = Severe acute respiratory syndrome coronavirus 2
ALIISVTSNYSGVVT

SEQ ID NO: 19087 - protein, 16 aa, Severe acute respiratory syndrome-related coronavirus
  REGION 1..16: note = Table B: HLA-DRB1*01:01L HLA-DRB3*02:01L HLA-DRB1*03:01L HLA-DQA1*05:05-B1*03:19L HLA-DPA1*01:03-B1*04:01L HLA-DRB1*10:01L
  source 1..16: note = Severe acute respiratory syndrome coronavirus 2
VDINKLCEEMLDNRAT

SEQ ID NO: 19088 - protein, 13 aa, Severe acute respiratory syndrome-related coronavirus
  REGION 1..13: note = Table B: HLA-DRB1*01:01L HLA-DRB3*02:01L HLA-DPA1*03:01-B1*04:02L HLA-DRB1*14:02L HLA-DQA1*01:01-B1*05:01L HLA-DRB1*11:01L HLA-DRB4*01:01L HLA-DPA1*02:01-B1*13:01L HLA-DRB1*07:01L
  source 1..13: note = Severe acute respiratory syndrome coronavirus 2
LPSYAAFATAQEA

SEQ ID NO: 19089 - protein, 14 aa, Severe acute respiratory syndrome-related coronavirus
  REGION 1..14: note = Table B: HLA-DRB1*01:01L HLA-DRB3*02:01L HLA-DRB1*13:01L HLA-DPA1*01:03-B1*04:02L HLA-DRB3*01:01L HLA-DPA1*01:03-B1*104:01L HLA-DRB1*15:03L
  source 1..14: note = Severe acute respiratory syndrome coronavirus 2
AQEAYEQAVANGDS

SEQ ID NO: 19090 - protein, 16 aa, Severe acute respiratory syndrome-related coronavirus
  REGION 1..16: note = Table B: HLA-DRB1*01:01L HLA-DPA1*01:03-B1*104:01L
  source 1..16: note = Severe acute respiratory syndrome coronavirus 2
LKKSLNVAKSEFDRDA

SEQ ID NO: 19091 - protein, 15 aa, Severe acute respiratory syndrome-related coronavirus
  REGION 1..15: note = Table B: HLA-DRB1*01:01L HLA-DRB1*08:77L HLA-DRB3*02:01L HLA-DPA1*01:03-B1*03:01L HLA-DPA1*03:01-B1*04:02L HLA-DQA1*05:01-B1*02:01L HLA-DPA1*01:03-B1*04:02L HLA-DPA1*02:01-B1*13:01L HLA-DPA1*01:03-B1*02:01L
  REGION 1..15: note = CONT. FROM ABOVE: HLA-DQA1*05:05-B1*03:01L HLA-DRB1*07:01L HLA-D RB1*10:01L
  source 1..15: note = Severe acute respiratory syndrome coronavirus 2
DQAMTQMYKQARSED

SEQ ID NO: 19092 - protein, 13 aa, Severe acute respiratory syndrome-related coronavirus
  REGION 1..13: note = Table B: HLA-DRB1*01:01L HLA-DRB1*07:01L HLA-DQA1*01:03-B1*06:01L
  source 1..13: note = Severe acute respiratory syndrome coronavirus 2
TQMYKQARSEDKR

SEQ ID NO: 19093 - protein, 16 aa, Severe acute respiratory syndrome-related coronavirus
  REGION 1..16: note = Table B: HLA-DRB1*01:01L HLA-DRB1*11:02L HLA-DRB1*11:03L HLA-DRB1*11:04L HLA-DQA1*01:01-B1*05:01L HLA-DQA1*05:05-B1*03:116L
  source 1..16: note = Severe acute respiratory syndrome coronavirus 2
DGTTFTYASALWEIQQ

SEQ ID NO: 19094 - protein, 15 aa, Severe acute respiratory syndrome-related coronavirus
  REGION 1..15: note = Table B: HLA-DRB1*01:01L HLA-DPA1*03:01-B1*04:02L HLA-DRB1*14:02L HLA-DRB1*11:01L HLA-DPA1*01:03-B1*02:01L HLA-DRB1*07:01L HLA-DRB1*08:02L
  source 1..15: note = Severe acute respiratory syndrome coronavirus 2
SALWEIQQVVDADSK

SEQ ID NO: 19095 - protein, 14 aa, Severe acute respiratory syndrome-related coronavirus
  REGION 1..14: note = Table B: HLA-DRB1*01:01L HLA-DRB1*11:02L HLA-DPA1*01:03-B1*02:01L HLA-DRB1*08:02L
  source 1..14: note = Severe acute respiratory syndrome coronavirus 2
QVVDADSKIVQLSE

SEQ ID NO: 19096 - protein, 12 aa, Severe acute respiratory syndrome-related coronavirus
  REGION 1..12: note = Table B: HLA-DRB1*01:01L HLA-DRB3*02:01L HLA-DPA1*01:03-B1*03:01L HLA-DPA1*03:01-B1*04:02L HLA-DQA1*01:01-B1*05:01L HLA-DRB1*08:01L HLA-DRB1*11:01L HLA-DRB1*12:02L HLA-DRB3*01:01L HLA-DPA1*02:01-B1*13:01L
  REGION 1..12: note = CONT. FROM ABOVE: HLA-DPA1*01:03-B1*104:01L HLA-DPA1*01:02-B1*04 :01L HLA-DRB1*07:01L HLA-DQA1*01:03-B1*06:01L
  source 1..12: note = Severe acute respiratory syndrome coronavirus 2
VKLQNNELSPVA

SEQ ID NO: 19097 - protein, 16 aa, Severe acute respiratory syndrome-related coronavirus
  REGION 1..16: note = Table B: HLA-DRB1*01:01L HLA-DRB1*11:03L HLA-DRB1*14:02L HLA-DRB1*11:01L HLA-DRB1*09:01L HLA-DRB3*01:01L HLA-DRB1*08:03L
  source 1..16: note = Severe acute respiratory syndrome coronavirus 2
DAAKAYKDYLASGGQP

SEQ ID NO: 19098 - protein, 14 aa, Severe acute respiratory syndrome-related coronavirus
  REGION 1..14: note = Table B: HLA-DRB1*01:01L
  source 1..14: note = Severe acute respiratory syndrome coronavirus 2
KAYKDYLASGGQPI

SEQ ID NO: 19099 - protein, 19 aa, Severe acute respiratory syndrome-related coronavirus
  REGION 1..19: note = Table B: HLA-DRB1*01:01L HLA-DPA1*01:03-B1*03:01L HLA-DRB1*14:02L HLA-DPA1*03:01-B1*105:01L HLA-DQA1*05:05-B1*03:01L
  source 1..19: note = Severe acute respiratory syndrome coronavirus 2
HPNPKGFCDLKGKYVQIPT

SEQ ID NO: 19100 - protein, 15 aa, Severe acute respiratory syndrome-related coronavirus
  REGION 1..15: note = Table B: HLA-DRB1*01:01L HLA-DRB1*11:01L HLA-DRB4*01:01L HLA-DQA1*05:05-B1*03:116L
  source 1..15: note = Severe acute respiratory syndrome coronavirus 2
DFGDFIQTTPGSGVP

SEQ ID NO: 19101 - protein, 15 aa, Severe acute respiratory syndrome-related coronavirus
  REGION 1..15: note = Table B: HLA-DRB1*01:01L HLA-DRB1*08:04L HLA-DRB1*11:01L HLA-DRB1*09:01L HLA-DPA1*02:01-B1*13:01L
  source 1..15: note = Severe acute respiratory syndrome coronavirus 2
DFIQTTPGSGVPVVD

SEQ ID NO: 19102 - protein, 15 aa, Severe acute respiratory syndrome-related coronavirus
  REGION 1..15: note = Table B: HLA-DRB1*01:01L
  source 1..15: note = Severe acute respiratory syndrome coronavirus 2
DSYYSLLMPILTLTR

SEQ ID NO: 19103 - protein, 14 aa, Severe acute respiratory syndrome-related coronavirus
  REGION 1..14: note = Table B: HLA-DRB1*01:01L
  source 1..14: note = Severe acute respiratory syndrome coronavirus 2
MPILTLTRALTAES

SEQ ID NO: 19104 - protein, 11 aa, Severe acute respiratory syndrome-related coronavirus
  REGION 1..11: note = Table B: HLA-DRB1*01:01L HLA-DRB1*01:02L HLA-DRB3*02:01L HLA-DRB1*08:01L HLA-DRB1*12:02L HLA-DRB1*04:08L
  source 1..11: note = Severe acute respiratory syndrome coronavirus 2
SHVDTDLTKPY

SEQ ID NO: 19105 - protein, 14 aa, Severe acute respiratory syndrome-related coronavirus
  REGION 1..14: note = Table B: HLA-DRB1*01:01L HLA-DRB1*03:01L HLA-DRB1*11:01L HLA-DRB1*07:01L
  source 1..14: note = Severe acute respiratory syndrome coronavirus 2
LGVVHNQDVNLHSS

SEQ ID NO: 19106 - protein, 14 aa, Severe acute respiratory syndrome-related coronavirus
  REGION 1..14: note = Table B: HLA-DRB1*01:01L HLA-DRB1*03:01L HLA-DQA1*01:01-B1*05:01L HLA-DRB1*11:01L HLA-DPA1*02:01-B1*13:01L HLA-DRB1*07:01L
  source 1..14: note = Severe acute respiratory syndrome coronavirus 2
GVVHNQDVNLHSSR

SEQ ID NO: 19107 - protein, 12 aa, Severe acute respiratory syndrome-related coronavirus
  REGION 1..12: note = Table B: HLA-DRB1*01:01L HLA-DRB5*01:01L HLA-DRB4*01:01L
  source 1..12: note = Severe acute respiratory syndrome coronavirus 2
VYAADPAMHAAS

SEQ ID NO: 19108 - protein, 12 aa, Severe acute respiratory syndrome-related coronavirus
  REGION 1..12: note = Table B: HLA-DRB1*01:01L HLA-DRB1*03:01L HLA-DRB1*11:02L HLA-DRB5*01:01L HLA-DRB1*13:01L HLA-DRB4*01:01L HLA-DPA1*01:03-B1*104:01L HLA-DRB1*08:02L
  source 1..12: note = Severe acute respiratory syndrome coronavirus 2
YAADPAMHAASG

SEQ ID NO: 19109 - protein, 13 aa, Severe acute respiratory syndrome-related coronavirus
  REGION 1..13: note = Table B: HLA-DRB1*01:01L
  source 1..13: note = Severe acute respiratory syndrome coronavirus 2
PAMHAASGNLLLD

SEQ ID NO: 19110 - protein, 13 aa, Severe acute respiratory syndrome-related coronavirus
  REGION 1..13: note = Table B: HLA-DRB1*01:01L
  source 1..13: note = Severe acute respiratory syndrome coronavirus 2
YDFAVSKGFFKEG

SEQ ID NO: 19111 - protein, 14 aa, Severe acute respiratory syndrome-related coronavirus
  REGION 1..14: note = Table B: HLA-DRB1*01:01L
  source 1..14: note = Severe acute respiratory syndrome coronavirus 2
LKSIAATRGATVVI

SEQ ID NO: 19112 - protein, 14 aa, Severe acute respiratory syndrome-related coronavirus
  REGION 1..14: note = Table B: HLA-DRB1*01:01L HLA-DRB1*11:01L
  source 1..14: note = Severe acute respiratory syndrome coronavirus 2
HRFYRLANECAQVL

SEQ ID NO: 19113 - protein, 12 aa, Severe acute respiratory syndrome-related coronavirus
  REGION 1..12: note = Table B: HLA-DRB1*01:01L HLA-DQA1*01-B1*05L HLA-DRB3*01:01L
  source 1..12: note = Severe acute respiratory syndrome coronavirus 2
ALLSTDGNKIAD

SEQ ID NO: 19114 - protein, 14 aa, Severe acute respiratory syndrome-related coronavirus
  REGION 1..14: note = Table B: HLA-DRB1*01:01L HLA-DRB1*14:01L HLA-DRB1*11:02L HLA-DRB1*11:03L HLA-DQA1*01-B1*05L HLA-DRB4*01:01L HLA-DRB1*09:01L HLA-DRB1*12:02L HLA-DRB3*01:01L HLA-DRB1*14:54L HLA-DRB1*07:01L HLA-DRB1*08:02L HLA-DRB1*08:03L
  source 1..14: note = Severe acute respiratory syndrome coronavirus 2
NSTYASQGLVASIK

SEQ ID NO: 19115 - protein, 14 aa, Severe acute respiratory syndrome-related coronavirus
  REGION 1..14: note = Table B: HLA-DRB1*01:01L HLA-DRB1*14:01L HLA-DRB1*11:03L HLA-DQA1*01-B1*05L HLA-DRB3*01:01L HLA-DRB1*14:54L HLA-DRB1*07:01L HLA-DRB1*08:02L HLA-DRB1*08:03L
  source 1..14: note = Severe acute respiratory syndrome coronavirus 2
STYASQGLVASIKN

SEQ ID NO: 19116 - protein, 15 aa, Severe acute respiratory syndrome-related coronavirus
  REGION 1..15: note = Table B: HLA-DRB1*01:01L HLA-DRB3*02:01L HLA-DPA1*03:01-B1*04:02L HLA-DRB1*11:03L HLA-DRB1*14:02L HLA-DQA1*05:01-B1*02:01L HLA-DPA1*01:03-B1*04:02L HLA-DPA1*01:03-B1*104:01L HLA-DPA1*01:02-B1*04:01L
  REGION 1..15: note = CONT. FROM ABOVE: HLA-DRB1*08:02L
  source 1..15: note = Severe acute respiratory syndrome coronavirus 2
SQGLVASIKNFKSVL

SEQ ID NO: 19117 - protein, 14 aa, Severe acute respiratory syndrome-related coronavirus
  REGION 1..14: note = Table B: HLA-DRB1*01:01L HLA-DRB1*11:02L HLA-DRB1*11:03L HLA-DRB1*11:04L HLA-DRB1*11:01L HLA-DRB1*07:01L HLA-DRB1*08:03L
  source 1..14: note = Severe acute respiratory syndrome coronavirus 2
VASIKNFKSVLYYQ

SEQ ID NO: 19118 - protein, 14 aa, Severe acute respiratory syndrome-related coronavirus
  REGION 1..14: note = Table B: HLA-DRB1*01:01L HLA-DRB1*11:02L HLA-DRB1*11:03L HLA-DRB1*11:04L HLA-DRB1*11:01L HLA-DRB1*08:03L
  source 1..14: note = Severe acute respiratory syndrome coronavirus 2
ASIKNFKSVLYYQN

SEQ ID NO: 19119 - protein, 15 aa, Severe acute respiratory syndrome-related coronavirus
  REGION 1..15: note = Table B: HLA-DRB1*01:01L HLA-DRB1*09:01L HLA-DRB1*12:02L
  source 1..15: note = Severe acute respiratory syndrome coronavirus 2
VMLTNDNTSRYWEPE

SEQ ID NO: 19120 - protein, 14 aa, Severe acute respiratory syndrome-related coronavirus
  REGION 1..14: note = Table B: HLA-DRB1*01:01L
  source 1..14: note = Severe acute respiratory syndrome coronavirus 2
EPEFYEAMYTPHTV

SEQ ID NO: 19121 - protein, 14 aa, Severe acute respiratory syndrome-related coronavirus
  REGION 1..14: note = Table B: HLA-DRB1*01:01L
  source 1..14: note = Severe acute respiratory syndrome coronavirus 2
EFYEAMYTPHTVLQ

SEQ ID NO: 19122 - protein, 13 aa, Severe acute respiratory syndrome-related coronavirus
  REGION 1..13: note = Table B: HLA-DRB1*01:01L HLA-DRB1*08:77L HLA-DRB3*02:01L HLA-DPA1*03:01-B1*04:02L HLA-DRB1*11:03L HLA-DRB1*14:02L HLA-DRB5*01:01L HLA-DRB4*01:01L HLA-DRB1*09:01L HLA-DPA1*01:03-B1*04:02L HLA-DRB3*01:01L
  REGION 1..13: note = CONT. FROM ABOVE: HLA-DPA1*01:03-B1*02:01L HLA-DPA1*01:03-B1*104 :01L HLA-DRB1*07:01L HLA-DRB1*08:02L
  source 1..13: note = Severe acute respiratory syndrome coronavirus 2
AGDYILANTCTER

SEQ ID NO: 19123 - protein, 14 aa, Severe acute respiratory syndrome-related coronavirus
  REGION 1..14: note = Table B: HLA-DRB1*01:01L HLA-DRB1*11:02L HLA-DRB1*13:01L HLA-DRB4*01:01L HLA-DPA1*01:03-B1*04:01L HLA-DRB1*09:01L HLA-DPA1*01:03-B1*02:01L HLA-DPA1*01:03-B1*104:01L HLA-DRB1*07:01L HLA-DRB1*08:02L
  source 1..14: note = Severe acute respiratory syndrome coronavirus 2
GDYILANTCTERLK

SEQ ID NO: 19124 - protein, 14 aa, Severe acute respiratory syndrome-related coronavirus
  REGION 1..14: note = Table B: HLA-DRB1*01:01L HLA-DRB3*02:01L HLA-DRB1*11:03L HLA-DRB4*01:01L HLA-DRB1*09:01L HLA-DRB3*01:01L HLA-DRB1*07:01L HLA-DRB1*08:02L HLA-DRB1*08:03L
  source 1..14: note = Severe acute respiratory syndrome coronavirus 2
LKLFAAETLKATEE

SEQ ID NO: 19125 - protein, 17 aa, Severe acute respiratory syndrome-related coronavirus
  REGION 1..17: note = Table B: HLA-DRB1*01:01L
  source 1..17: note = Severe acute respiratory syndrome coronavirus 2
DRELHLSWEVGKPRPPL

SEQ ID NO: 19126 - protein, 13 aa, Severe acute respiratory syndrome-related coronavirus
  REGION 1..13: note = Table B: HLA-DRB1*01:01L
  source 1..13: note = Severe acute respiratory syndrome coronavirus 2
VGDYFVLTSHTVM

SEQ ID NO: 19127 - protein, 14 aa, Severe acute respiratory syndrome-related coronavirus
  REGION 1..14: note = Table B: HLA-DRB1*01:01L HLA-DRB1*04:08L
  source 1..14: note = Severe acute respiratory syndrome coronavirus 2
SHTVMPLSAPTLVP

SEQ ID NO: 19128 - protein, 15 aa, Severe acute respiratory syndrome-related coronavirus
  REGION 1..15: note = Table B: HLA-DRB1*01:01L
  source 1..15: note = Severe acute respiratory syndrome coronavirus 2
VRITGLYPTLNISDE

SEQ ID NO: 19129 - protein, 12 aa, Severe acute respiratory syndrome-related coronavirus
  REGION 1..12: note = Table B: HLA-DRB1*01:01L HLA-DRB1*12:01L HLA-DRB1*10:01L HLA-DRB1*15:03L
  source 1..12: note = Severe acute respiratory syndrome coronavirus 2
KYSTLQGPPGTG

SEQ ID NO: 19130 - protein, 16 aa, Severe acute respiratory syndrome-related coronavirus
  REGION 1..16: note = Table B: HLA-DRB1*01:01L HLA-DRB3*02:01L HLA-DRB1*11:04L HLA-DRB1*07:01L
  source 1..16: note = Severe acute respiratory syndrome coronavirus 2
KSHFAIGLALYYPSAR

SEQ ID NO: 19131 - protein, 14 aa, Severe acute respiratory syndrome-related coronavirus
  REGION 1..14: note = Table B: HLA-DRB1*01:01L HLA-DRB1*07:01L
  source 1..14: note = Severe acute respiratory syndrome coronavirus 2
FDKFKVNSTLEQYV

SEQ ID NO: 19132 - protein, 11 aa, Severe acute respiratory syndrome-related coronavirus
  REGION 1..11: note = Table B: HLA-DRB1*01:01L HLA-DRB3*02:01L HLA-DRB1*14:01L HLA-DRB1*11:04L HLA-DRB1*12:02L HLA-DRB1*08:02L HLA-DRB1*15:01L
  source 1..11: note = Severe acute respiratory syndrome coronavirus 2
TNYDLSVVNAR

SEQ ID NO: 19133 - protein, 14 aa, Severe acute respiratory syndrome-related coronavirus
  REGION 1..14: note = Table B: HLA-DRB1*01:01L HLA-DRB1*11:04L HLA-DRB1*11:01L HLA-DRB1*07:01L
  source 1..14: note = Severe acute respiratory syndrome coronavirus 2
YDLSVVNARLRAKH

SEQ ID NO: 19134 - protein, 14 aa, Severe acute respiratory syndrome-related coronavirus
  REGION 1..14: note = Table B: HLA-DRB1*01:01L HLA-DRB1*03:01L HLA-DRB1*08:01L HLA-DRB1*11:01L HLA-DRB5*01:01L HLA-DRB4*01:01L HLA-DRB1*09:01L HLA-DPA1*01:03-B1*04:02L HLA-DRB3*01:01L HLA-DPA1*01:03-B1*104:01L HLA-DPA1*01:02-B1*04:01L
  REGION 1..14: note = CONT. FROM ABOVE: HLA-DRB1*07:01L HLA-DQA1*01:03-B1*06:01L HLA-D RB1*08:02L
  source 1..14: note = Severe acute respiratory syndrome coronavirus 2
HYVYIGDPAQLPAP

SEQ ID NO: 19135 - protein, 14 aa, Severe acute respiratory syndrome-related coronavirus
  REGION 1..14: note = Table B: HLA-DRB1*01:01L
  source 1..14: note = Severe acute respiratory syndrome coronavirus 2
KGTLEPEYFNSVCR

SEQ ID NO: 19136 - protein, 14 aa, Severe acute respiratory syndrome-related coronavirus
  REGION 1..14: note = Table B: HLA-DRB1*01:01L
  source 1..14: note = Severe acute respiratory syndrome coronavirus 2
KMFYKGVITHDVSS

SEQ ID NO: 19137 - protein, 15 aa, Severe acute respiratory syndrome-related coronavirus
  REGION 1..15: note = Table B: HLA-DRB1*01:01L HLA-DRB1*11:03L HLA-DPA1*03:01-B1*105:01L
  source 1..15: note = Severe acute respiratory syndrome coronavirus 2
VVREFLTRNPAWRKA

SEQ ID NO: 19138 - protein, 12 aa, Severe acute respiratory syndrome-related coronavirus
  REGION 1..12: note = Table B: HLA-DRB1*01:01L HLA-DRB1*08:04L HLA-DRB3*02:01L HLA-DPA1*01:03-B1*03:01L HLA-DRB1*07:01L
  source 1..12: note = Severe acute respiratory syndrome coronavirus 2
KILGLPTQTVDS

SEQ ID NO: 19139 - protein, 13 aa, Severe acute respiratory syndrome-related coronavirus
  REGION 1..13: note = Table B: HLA-DRB1*01:01L HLA-DRB3*02:01L HLA-DPA1*03:01-B1*04:02L HLA-DRB1*11:01L HLA-DRB4*01:01L HLA-DRB1*09:01L HLA-DPA1*01:03-B1*04:02L HLA-DRB3*01:01L HLA-DPA1*01:03-B1*104:01L HLA-DRB1*07:01L
  source 1..13: note = Severe acute respiratory syndrome coronavirus 2
DYVIFTQTTETAH

SEQ ID NO: 19140 - protein, 15 aa, Severe acute respiratory syndrome-related coronavirus
  REGION 1..15: note = Table B: HLA-DRB1*01:01L
  source 1..15: note = Severe acute respiratory syndrome coronavirus 2
KLQFTSLEIPRRNVA

SEQ ID NO: 19141 - protein, 15 aa, Severe acute respiratory syndrome-related coronavirus
  REGION 1..15: note = Table B: HLA-DRB1*01:01L HLA-DRB1*11:04L HLA-DRB1*11:01L HLA-DRB3*01:01L HLA-DRB1*08:03L
  source 1..15: note = Severe acute respiratory syndrome coronavirus 2
IPRRNVATLQAENVT

SEQ ID NO: 19142 - protein, 15 aa, Severe acute respiratory syndrome-related coronavirus
  REGION 1..15: note = Table B: HLA-DRB1*01:01L HLA-DRB1*11:01L
  source 1..15: note = Severe acute respiratory syndrome coronavirus 2
PNMFITREEAIRHVR

SEQ ID NO: 19143 - protein, 11 aa, Severe acute respiratory syndrome-related coronavirus
  REGION 1..11: note = Table B: HLA-DRB1*01:01L HLA-DRB1*01:02L
  source 1..11: note = Severe acute respiratory syndrome coronavirus 2
GYVDTPNNTDF

SEQ ID NO: 19144 - protein, 19 aa, Severe acute respiratory syndrome-related coronavirus
  REGION 1..19: note = Table B: HLA-DRB1*01:01L HLA-DRB1*14:02L HLA-DPA1*01:03-B1*04:02L
  source 1..19: note = Severe acute respiratory syndrome coronavirus 2
TPNNTDFSRVSAKPPPGDQ

SEQ ID NO: 19145 - protein, 15 aa, Severe acute respiratory syndrome-related coronavirus
  REGION 1..15: note = Table B: HLA-DRB1*01:01L HLA-DRB1*07:01L
  source 1..15: note = Severe acute respiratory syndrome coronavirus 2
VKAALLADKFPVLHD

SEQ ID NO: 19146 - protein, 13 aa, Severe acute respiratory syndrome-related coronavirus
  REGION 1..13: note = Table B: HLA-DRB1*01:01L HLA-DRB1*08:77L HLA-DRB3*02:01L HLA-DRB1*11:03L HLA-DRB1*08:02L
  source 1..13: note = Severe acute respiratory syndrome coronavirus 2
EELFYSYATHSDK

SEQ ID NO: 19147 - protein, 13 aa, Severe acute respiratory syndrome-related coronavirus
  REGION 1..13: note = Table B: HLA-DRB1*01:01L
  source 1..13: note = Severe acute respiratory syndrome coronavirus 2
TPAFDKSAFVNLK

SEQ ID NO: 19148 - protein, 15 aa, Severe acute respiratory syndrome-related coronavirus
  REGION 1..15: note = Table B: HLA-DRB1*01:01L HLA-DRB4*03:01NL HLA-DRB1*08:77L HLA-DRB1*03:01L HLA-DRB1*11:02L HLA-DRB1*11:03L HLA-DQA1*01:01-B1*05:01L HLA-DRB1*11:01L HLA-DRB4*01:01L HLA-DPA1*01:03-B1*04:01L HLA-DQA1*05:05-B1*03:116L
  REGION 1..15: note = CONT. FROM ABOVE: HLA-DRB1*04:10L HLA-DRB1*09:01L HLA-DRB1*12:02 L HLA-DPA1*01:03-B1*02:01L HLA-DPA1*01:03-B1*104:01L HLA-DRB1*07 :01L HLA-DRB1*10:01L HLA-DRB1*08:02L
  source 1..15: note = Severe acute respiratory syndrome coronavirus 2
LPFFYYSDSPCESHG

SEQ ID NO: 19149 - protein, 14 aa, Severe acute respiratory syndrome-related coronavirus
  REGION 1..14: note = Table B: HLA-DRB1*01:01L HLA-DRB1*11:04L HLA-DPA1*01:03-B1*104:01L HLA-DRB1*10:01L
  source 1..14: note = Severe acute respiratory syndrome coronavirus 2
FDTYNLWNTFTRLQ

SEQ ID NO: 19150 - protein, 14 aa, Severe acute respiratory syndrome-related coronavirus
  REGION 1..14: note = Table B: HLA-DRB1*01:01L HLA-DRB1*11:04L
  source 1..14: note = Severe acute respiratory syndrome coronavirus 2
DTYNLWNTFTRLQS

SEQ ID NO: 19151 - protein, 16 aa, Severe acute respiratory syndrome-related coronavirus
  REGION 1..16: note = Table B: HLA-DRB1*01:01L HLA-DRB3*02:01L HLA-DPA1*03:01-B1*04:02L HLA-DRB1*03:01L HLA-DRB1*14:02L HLA-DQA1*05:05-B1*03:19L HLA-DQA1*05:01-B1*02:01L HLA-DRB1*13:01L HLA-DPA1*01:03-B1*04:01L
  REGION 1..16: note = CONT. FROM ABOVE: HLA-DQA1*05:05-B1*03:116L HLA-DPA1*01:03-B1*04 :02L HLA-DRB1*14:54L HLA-DPA1*01:03-B1*104:01L HLA-DQA1*05:05-B1 *03:01L HLA-DRB1*10:01L
  source 1..16: note = Severe acute respiratory syndrome coronavirus 2
VAFELWAKRNIKPVPE

SEQ ID NO: 19152 - protein, 15 aa, Severe acute respiratory syndrome-related coronavirus
  REGION 1..15: note = Table B: HLA-DRB1*01:01L HLA-DRB3*02:01L HLA-DRB1*11:03L HLA-DRB1*11:04L HLA-DRB1*11:01L HLA-DPA1*03:01-B1*105:01L
  source 1..15: note = Severe acute respiratory syndrome coronavirus 2
AKRNIKPVPEVKILN

SEQ ID NO: 19153 - protein, 13 aa, Severe acute respiratory syndrome-related coronavirus
  REGION 1..13: note = Table B: HLA-DRB1*01:01L HLA-DRB1*03:01L HLA-DRB1*11:01L HLA-DPA1*01:03-B1*04:02L HLA-DPA1*01:03-B1*104:01L
  source 1..13: note = Severe acute respiratory syndrome coronavirus 2
KILNNLGVDIAAN

SEQ ID NO: 19154 - protein, 15 aa, Severe acute respiratory syndrome-related coronavirus
  REGION 1..15: note = Table B: HLA-DRB1*01:01L HLA-DRB3*02:01L
  source 1..15: note = Severe acute respiratory syndrome coronavirus 2
ANTVIWDYKRDAPAH

SEQ ID NO: 19155 - protein, 14 aa, Severe acute respiratory syndrome-related coronavirus
  REGION 1..14: note = Table B: HLA-DRB1*01:01L HLA-DPA1*01:03-B1*03:01L HLA-DRB1*03:01L HLA-DRB1*11:03L HLA-DRB1*11:04L HLA-DRB1*14:02L HLA-DRB1*11:01L HLA-DQA1*05:05-B1*03:19L HLA-DQA1*05:05-B1*03:01L
  source 1..14: note = Severe acute respiratory syndrome coronavirus 2
VDLFRNARNGVLIT

SEQ ID NO: 19156 - protein, 14 aa, Severe acute respiratory syndrome-related coronavirus
  REGION 1..14: note = Table B: HLA-DRB1*01:01L HLA-DPA1*03:01-B1*04:02L HLA-DRB1*11:02L HLA-DRB1*11:03L HLA-DRB1*14:02L HLA-DQA1*05:05-B1*03:19L HLA-DQA1*05:05-B1*03:116L HLA-DPA1*01:03-B1*04:02L HLA-DPA1*01:03-B1*02:01L
  REGION 1..14: note = CONT. FROM ABOVE: HLA-DQA1*05:05-B1*03:01L HLA-DRB1*07:01L HLA-D RB1*08:02L
  source 1..14: note = Severe acute respiratory syndrome coronavirus 2
TQFNYYKKVDGVVQ

SEQ ID NO: 19157 - protein, 14 aa, Severe acute respiratory syndrome-related coronavirus
  REGION 1..14: note = Table B: HLA-DRB1*01:01L
  source 1..14: note = Severe acute respiratory syndrome coronavirus 2
QAWQPGVAMPNLYK

SEQ ID NO: 19158 - protein, 14 aa, Severe acute respiratory syndrome-related coronavirus
  REGION 1..14: note = Table B: HLA-DRB1*01:01L HLA-DRB1*03:01L HLA-DRB4*01:01L HLA-DPA1*01:03-B1*04:01L HLA-DQA1*05:05-B1*03:116L HLA-DPA1*01:03-B1*02:01L HLA-DRB1*15:01L
  source 1..14: note = Severe acute respiratory syndrome coronavirus 2
DLQNYGDSATLPKG

SEQ ID NO: 19159 - protein, 16 aa, Severe acute respiratory syndrome-related coronavirus
  REGION 1..16: note = Table B: HLA-DRB1*01:01L HLA-DPA1*01:03-B1*04:02L
  source 1..16: note = Severe acute respiratory syndrome coronavirus 2
LNTLTLAVPYNMRVIH

SEQ ID NO: 19160 - protein, 17 aa, Severe acute respiratory syndrome-related coronavirus
  REGION 1..17: note = Table B: HLA-DRB1*01:01L HLA-DRB1*03:01L HLA-DRB1*11:01L HLA-DPA1*01:03-B1*02:01L HLA-DRB1*07:01L HLA-DRB1*08:02L
  source 1..17: note = Severe acute respiratory syndrome coronavirus 2
LPTGTLLVDSDLNDFVS

SEQ ID NO: 19161 - protein, 16 aa, Severe acute respiratory syndrome-related coronavirus
  REGION 1..16: note = Table B: HLA-DRB1*01:01L HLA-DRB1*03:01L HLA-DRB1*11:01L HLA-DRB3*01:01L
  source 1..16: note = Severe acute respiratory syndrome coronavirus 2
DSTLIGDCATVHTANK

SEQ ID NO: 19162 - protein, 14 aa, Severe acute respiratory syndrome-related coronavirus
  REGION 1..14: note = Table B: HLA-DRB1*01:01L HLA-DRB3*01:01L
  source 1..14: note = Severe acute respiratory syndrome coronavirus 2
GTAVMSLKEGQIND

SEQ ID NO: 19163 - protein, 14 aa, Severe acute respiratory syndrome-related coronavirus
  REGION 1..14: note = Table B: HLA-DRB1*01:01L HLA-DRB1*11:03L HLA-DRB1*11:04L HLA-DRB1*09:01L HLA-DRB1*07:01L
  source 1..14: note = Severe acute respiratory syndrome coronavirus 2
NVTWFHAIHVSGTN

SEQ ID NO: 19164 - protein, 15 aa, Severe acute respiratory syndrome-related coronavirus
  REGION 1..15: note = Table B: HLA-DRB1*01:01L HLA-DPA1*01:03-B1*04:01L HLA-DPA1*01:03-B1*02:01L HLA-DRB1*08:02L
  source 1..15: note = Severe acute respiratory syndrome coronavirus 2
IRGWIFGTTLDSKTQ

SEQ ID NO: 19165 - protein, 14 aa, Severe acute respiratory syndrome-related coronavirus
  REGION 1..14: note = Table B: HLA-DRB1*01:01L HLA-DRB1*11:04L HLA-DRB1*11:01L
  source 1..14: note = Severe acute respiratory syndrome coronavirus 2
QGNFKNLREFVFKN

SEQ ID NO: 19166 - protein, 14 aa, Severe acute respiratory syndrome-related coronavirus
  REGION 1..14: note = Table B: HLA-DRB1*01:01L HLA-DRB1*11:02L HLA-DPA1*01:03-B1*04:01L HLA-DPA1*01:03-B1*04:02L HLA-DPA1*01:03-B1*104:01L HLA-DPA1*01:02-B1*04:01L
  source 1..14: note = Severe acute respiratory syndrome coronavirus 2
SALEPLVDLPIGIN

SEQ ID NO: 19167 - protein, 15 aa, Severe acute respiratory syndrome-related coronavirus
  REGION 1..15: note = Table B: HLA-DRB1*01:01L HLA-DRB1*14:02L HLA-DQA1*05:05-B1*03:116L HLA-DPA1*01:03-B1*04:02L HLA-DPA1*03:01-B1*105:01L HLA-DPA1*01:03-B1*02:01L HLA-DQA1*05:05-B1*03:01L HLA-DRB1*08:02L HLA-DRB1*08:03L
  source 1..15: note = Severe acute respiratory syndrome coronavirus 2
FQTLLALHRSYLTPG

SEQ ID NO: 19168 - protein, 15 aa, Severe acute respiratory syndrome-related coronavirus
  REGION 1..15: note = Table B: HLA-DRB1*01:01L HLA-DRB1*03:01L HLA-DRB1*11:01L HLA-DRB4*01:01L HLA-DRB1*12:02L HLA-DPA1*01:02-B1*04:01L HLA-DRB1*10:01L
  source 1..15: note = Severe acute respiratory syndrome coronavirus 2
ALHRSYLTPGDSSSG

SEQ ID NO: 19169 - protein, 19 aa, Severe acute respiratory syndrome-related coronavirus
  REGION 1..19: note = Table B: HLA-DRB1*01:01L HLA-DRB3*02:01L HLA-DRB1*11:02L HLA-DRB1*09:01L HLA-DRB1*07:01L
  source 1..19: note = Severe acute respiratory syndrome coronavirus 2
TPGDSSSGWTAGAAAYYVG

SEQ ID NO: 19170 - protein, 15 aa, Severe acute respiratory syndrome-related coronavirus
  REGION 1..15: note = Table B: HLA-DRB1*01:01L HLA-DPA1*01:03-B1*104:01L HLA-DRB1*10:01L HLA-DRB1*08:03L HLA-DRB1*15:01L
  source 1..15: note = Severe acute respiratory syndrome coronavirus 2
VEKGIYQTSNFRVQP

SEQ ID NO: 19171 - protein, 13 aa, Severe acute respiratory syndrome-related coronavirus
  REGION 1..13: note = Table B: HLA-DRB1*01:01L HLA-DQA1*01:01-B1*05:01L HLA-DRB1*04:10L HLA-DRB3*01:01L
  source 1..13: note = Severe acute respiratory syndrome coronavirus 2
NATRFASVYAWNR

SEQ ID NO: 19172 - protein, 13 aa, Severe acute respiratory syndrome-related coronavirus
  REGION 1..13: note = Table B: HLA-DRB1*01:01L HLA-DRB1*11:03L HLA-DRB1*11:04L HLA-DRB1*08:03L
  source 1..13: note = Severe acute respiratory syndrome coronavirus 2
ADYSVLYNSASFS

SEQ ID NO: 19173 - protein, 12 aa, Severe acute respiratory syndrome-related coronavirus
  REGION 1..12: note = Table B: HLA-DRB1*01:01L HLA-DRB3*02:01L HLA-DPA1*01:03-B1*03:01L HLA-DRB1*14:02L HLA-DQA1*01:01-B1*05:01L HLA-DRB1*11:01L HLA-DRB5*01:01L HLA-DQA1*05:05-B1*03:19L HLA-DRB4*01:01L
  REGION 1..12: note = CONT. FROM ABOVE: HLA-DPA1*01:03-B1*04:01L HLA-DRB1*09:01L HLA-D PA1*01:03-B1*04:02L HLA-DRB3*01:01L HLA-DPA1*02:01-B1*13:01L HLA -DPA1*01:03-B1*104:01L HLA-DPA1*01:02-B1*04:01L HLA-DRB1*07:01L HLA-DRB1*15:01L
  source 1..12: note = Severe acute respiratory syndrome coronavirus 2
VIAWNSNNLDSK

SEQ ID NO: 19174 - protein, 13 aa, Severe acute respiratory syndrome-related coronavirus
  REGION 1..13: note = Table B: HLA-DRB1*01:01L
  source 1..13: note = Severe acute respiratory syndrome coronavirus 2
VLSFELLHAPATV

SEQ ID NO: 19175 - protein, 12 aa, Severe acute respiratory syndrome-related coronavirus
  REGION 1..12: note = Table B: HLA-DRB1*01:01L HLA-DRB1*10:01L HLA-DRB1*16:01L HLA-DRB1*15:03L
  source 1..12: note = Severe acute respiratory syndrome coronavirus 2
FNGLTGTGVLTE

SEQ ID NO: 19176 - protein, 16 aa, Severe acute respiratory syndrome-related coronavirus
  REGION 1..16: note = Table B: HLA-DRB1*01:01L HLA-DRB1*08:04L HLA-DRB3*02:01L HLA-DRB1*11:02L HLA-DRB1*11:03L HLA-DQA1*05:05-B1*03:19L HLA-DQA1*05:01-B1*02:01L HLA-DPA1*01:03-B1*04:01L HLA-DRB1*09:01L HLA-DPA1*01:03-B1*04:02L
  REGION 1..16: note = CONT. FROM ABOVE: HLA-DQA1*05:05-B1*03:01L HLA-DRB1*08:03L
  source 1..16: note = Severe acute respiratory syndrome coronavirus 2
SNKKFLPFQQFGRDIA

SEQ ID NO: 19177 - protein, 14 aa, Severe acute respiratory syndrome-related coronavirus
  REGION 1..14: note = Table B: HLA-DRB1*01:01L HLA-DRB1*15:01L
  source 1..14: note = Severe acute respiratory syndrome coronavirus 2
EVPVAIHADQLTPT

SEQ ID NO: 19178 - protein, 15 aa, Severe acute respiratory syndrome-related coronavirus
  REGION 1..15: note = Table B: HLA-DRB1*01:01L HLA-DRB1*11:02L HLA-DRB1*13:01L HLA-DPA1*01:03-B1*02:01L
  source 1..15: note = Severe acute respiratory syndrome coronavirus 2
VPVAIHADQLTPTWR

SEQ ID NO: 19179 - protein, 14 aa, Severe acute respiratory syndrome-related coronavirus
  REGION 1..14: note = Table B: HLA-DRB1*01:01L HLA-DPA1*03:01-B1*04:02L HLA-DRB1*14:02L HLA-DRB4*01:01L HLA-DPA1*01:03-B1*04:02L HLA-DPA1*01:03-B1*104:01L
  source 1..14: note = Severe acute respiratory syndrome coronavirus 2
IIAYTMSLGAENSV

SEQ ID NO: 19180 - protein, 15 aa, Severe acute respiratory syndrome-related coronavirus
  REGION 1..15: note = Table B: HLA-DRB1*01:01L
  source 1..15: note = Severe acute respiratory syndrome coronavirus 2
QLNRALTGIAVEQDK

SEQ ID NO: 19181 - protein, 14 aa, Severe acute respiratory syndrome-related coronavirus
  REGION 1..14: note = Table B: HLA-DRB1*01:01L HLA-DPA1*03:01-B1*04:02L HLA-DRB1*14:02L HLA-DRB4*01:01L HLA-DRB1*09:01L HLA-DPA1*01:03-B1*02:01L HLA-DRB1*08:02L
  source 1..14: note = Severe acute respiratory syndrome coronavirus 2
NRALTGIAVEQDKN

SEQ ID NO: 19182 - protein, 14 aa, Severe acute respiratory syndrome-related coronavirus
  REGION 1..14: note = Table B: HLA-DRB1*01:01L HLA-DRB1*07:01L
  source 1..14: note = Severe acute respiratory syndrome coronavirus 2
QKLIANQFNSAIGK

SEQ ID NO: 19183 - protein, 15 aa, Severe acute respiratory syndrome-related coronavirus
  REGION 1..15: note = Table B: HLA-DRB1*01:01L HLA-DRB3*02:01L HLA-DRB1*14:02L HLA-DRB1*11:01L HLA-DRB4*01:01L HLA-DRB1*09:01L
  source 1..15: note = Severe acute respiratory syndrome coronavirus 2
IQDSLSSTASALGKL

SEQ ID NO: 19184 - protein, 14 aa, Severe acute respiratory syndrome-related coronavirus
  REGION 1..14: note = Table B: HLA-DRB1*01:01L HLA-DRB3*02:01L HLA-DRB1*03:01L HLA-DRB1*08:01L HLA-DRB3*01:01L
  source 1..14: note = Severe acute respiratory syndrome coronavirus 2
ALGKLQDVVNQNAQ

SEQ ID NO: 19185 - protein, 16 aa, Severe acute respiratory syndrome-related coronavirus
  REGION 1..16: note = Table B: HLA-DRB1*01:01L HLA-DRB1*03:01L HLA-DRB1*13:01L HLA-DRB4*01:01L
  source 1..16: note = Severe acute respiratory syndrome coronavirus 2
AQALNTLVKQLSSNFG

SEQ ID NO: 19186 - protein, 14 aa, Severe acute respiratory syndrome-related coronavirus
  REGION 1..14: note = Table B: HLA-DRB1*01:01L
  source 1..14: note = Severe acute respiratory syndrome coronavirus 2
SSNFGAISSVLNDI

SEQ ID NO: 19187 - protein, 14 aa, Severe acute respiratory syndrome-related coronavirus
  REGION 1..14: note = Table B: HLA-DRB1*01:01L HLA-DRB1*09:01L HLA-DPA1*01:03-B1*04:02L HLA-DRB3*01:01L HLA-DRB1*07:01L
  source 1..14: note = Severe acute respiratory syndrome coronavirus 2
FGAISSVLNDILSR

SEQ ID NO: 19188 - protein, 14 aa, Severe acute respiratory syndrome-related coronavirus
  REGION 1..14: note = Table B: HLA-DRB1*01:01L HLA-DRB1*03:01L HLA-DRB1*14:01L HLA-DRB1*11:04L HLA-DRB1*11:01L HLA-DPA1*03:01-B1*105:01L
  source 1..14: note = Severe acute respiratory syndrome coronavirus 2
SRLDKVEAEVQIDR

SEQ ID NO: 19189 - protein, 14 aa, Severe acute respiratory syndrome-related coronavirus
  REGION 1..14: note = Table B: HLA-DRB1*01:01L HLA-DRB1*11:03L HLA-DRB1*11:04L HLA-DRB3*01:01L HLA-DRB1*07:01L HLA-DRB1*08:03L
  source 1..14: note = Severe acute respiratory syndrome coronavirus 2
LQSLQTYVTQQLIR

SEQ ID NO: 19190 - protein, 14 aa, Severe acute respiratory syndrome-related coronavirus
  REGION 1..14: note = Table B: HLA-DRB1*01:01L HLA-DRB1*08:77L HLA-DRB3*02:01L HLA-DRB1*03:01L HLA-DRB1*11:02L HLA-DRB1*11:03L HLA-DRB1*14:02M HLA-DQA1*01:01-B1*05:01L HLA-DRB5*01:01L HLA-DRB1*13:01L HLA-DRB4*01:01L HLA-DQA1*05:05-B1*03:116L HLA-DRB1*09:01L
  REGION 1..14: note = CONT. FROM ABOVE: HLA-DRB1*12:02L HLA-DRB3*01:01L HLA-DPA1*01:03 -B1*104:01L HLA-DRB1*07:01L HLA-DRB1*08:02L HLA-DRB1*08:03L
  source 1..14: note = Severe acute respiratory syndrome coronavirus 2
LQTYVTQQLIRAAE

SEQ ID NO: 19191 - protein, 14 aa, Severe acute respiratory syndrome-related coronavirus
  REGION 1..14: note = Table B: HLA-DRB1*01:01L HLA-DRB3*01:01L HLA-DPA1*01:03-B1*104:01L
  source 1..14: note = Severe acute respiratory syndrome coronavirus 2
TYVTQQLIRAAEIR

SEQ ID NO: 19192 - protein, 16 aa, Severe acute respiratory syndrome-related coronavirus
  REGION 1..16: note = Table B: HLA-DRB1*01:01L HLA-DRB1*08:77L HLA-DRB1*11:02L HLA-DRB1*11:04L HLA-DRB1*14:02L HLA-DRB1*11:01L HLA-DQA1*05:05-B1*03:19L HLA-DRB1*09:01L HLA-DRB3*01:01L HLA-DRB1*08:02L HLA-DRB1*08:03L
  source 1..16: note = Severe acute respiratory syndrome coronavirus 2
APHGVVFLHVTYVPAQ

SEQ ID NO: 19193 - protein, 14 aa, Severe acute respiratory syndrome-related coronavirus
  REGION 1..14: note = Table B: HLA-DRB1*01:01L HLA-DRB1*03:01L HLA-DRB1*11:02L HLA-DRB1*13:01L HLA-DRB4*01:01L HLA-DPA1*01:03-B1*04:01L
  source 1..14: note = Severe acute respiratory syndrome coronavirus 2
INASVVNIQKEIDR

SEQ ID NO: 19194 - protein, 14 aa, Severe acute respiratory syndrome-related coronavirus
  REGION 1..14: note = Table B: HLA-DRB1*01:01L HLA-DRB1*11:01L HLA-DRB1*13:01L
  source 1..14: note = Severe acute respiratory syndrome coronavirus 2
IYNKIVDEPEEHVQ

SEQ ID NO: 19195 - protein, 16 aa, Severe acute respiratory syndrome-related coronavirus
  REGION 1..16: note = Table B: HLA-DRB1*01:01L HLA-DRB3*02:01L HLA-DPA1*03:01-B1*04:02L HLA-DRB1*03:01L HLA-DRB4*01:01L HLA-DPA1*01:03-B1*04:01L HLA-DPA1*01:03-B1*04:02L HLA-DPA1*01:03-B1*02:01L HLA-DPA1*01:02-B1*04:01L
  REGION 1..16: note = CONT. FROM ABOVE: HLA-DRB1*08:02L
  source 1..16: note = Severe acute respiratory syndrome coronavirus 2
EPEEHVQIHTIDGSSG

SEQ ID NO: 19196 - protein, 14 aa, Severe acute respiratory syndrome-related coronavirus
  REGION 1..14: note = Table B: HLA-DRB1*01:01L HLA-DRB1*08:04L HLA-DPA1*01:03-B1*03:01L HLA-DQA1*01:03-B1*06:01L
  source 1..14: note = Severe acute respiratory syndrome coronavirus 2
VQIHTIDGSSGVVN

SEQ ID NO: 19197 - protein, 15 aa, Severe acute respiratory syndrome-related coronavirus
  REGION 1..15: note = Table B: HLA-DRB1*01:01L HLA-DRB1*08:01L HLA-DRB1*07:01L
  source 1..15: note = Severe acute respiratory syndrome coronavirus 2
SQRVAGDSGFAAYSR

SEQ ID NO: 19198 - protein, 13 aa, Severe acute respiratory syndrome-related coronavirus
  REGION 1..13: note = Table B: HLA-DRB1*01:01L HLA-DRB1*03:01L HLA-DQA1*05:01-B1*02:01L
  source 1..13: note = Severe acute respiratory syndrome coronavirus 2
GNYKLNTDHSSSS

SEQ ID NO: 19199 - protein, 14 aa, Severe acute respiratory syndrome-related coronavirus
  REGION 1..14: note = Table B: HLA-DRB1*01:01L HLA-DPA1*03:01-B1*04:02L HLA-DRB1*11:02L HLA-DRB1*09:01L HLA-DPA1*01:03-B1*04:02L HLA-DPA1*01:03-B1*104:01L HLA-DPA1*01:02-B1*04:01L HLA-DRB1*08:02L
  source 1..14: note = Severe acute respiratory syndrome coronavirus 2
NYKLNTDHSSSSDN

SEQ ID NO: 19200 - protein, 15 aa, Severe acute respiratory syndrome-related coronavirus
  REGION 1..15: note = Table B: HLA-DRB1*01:01L HLA-DRB1*13:01L HLA-DPA1*01:03-B1*04:01L HLA-DRB1*09:01L
  source 1..15: note = Severe acute respiratory syndrome coronavirus 2
INLIIKNLSKSLTEN

SEQ ID NO: 19201 - protein, 14 aa, Severe acute respiratory syndrome-related coronavirus
  REGION 1..14: note = Table B: HLA-DRB1*01:01L HLA-DRB1*03:01L
  source 1..14: note = Severe acute respiratory syndrome coronavirus 2
SGTYEGNSPFHPLA

SEQ ID NO: 19202 - protein, 13 aa, Severe acute respiratory syndrome-related coronavirus
  REGION 1..13: note = Table B: HLA-DRB1*01:01L HLA-DRB1*08:04L HLA-DQA1*05:05-B1*03:19L HLA-DPA1*02:01-B1*13:01L HLA-DPA1*03:01-B1*105:01L HLA-DQA1*05:05-B1*03:01L HLA-DQA1*01:03-B1*06:01L
  source 1..13: note = Severe acute respiratory syndrome coronavirus 2
WYIRVGARKSAPL

SEQ ID NO: 19203 - protein, 14 aa, Severe acute respiratory syndrome-related coronavirus
  REGION 1..14: note = Table B: HLA-DRB1*01:01L HLA-DRB1*07:01L HLA-DRB1*08:03L
  source 1..14: note = Severe acute respiratory syndrome coronavirus 2
EDFLEYHDVRVVLD

SEQ ID NO: 19204 - protein, 15 aa, Severe acute respiratory syndrome-related coronavirus
  REGION 1..15: note = Table B: HLA-DRB1*01:01L HLA-DRB1*08:02L
  source 1..15: note = Severe acute respiratory syndrome coronavirus 2
GVPINTNSSPDDQIG

SEQ ID NO: 19205 - protein, 14 aa, Severe acute respiratory syndrome-related coronavirus
  REGION 1..14: note = Table B: HLA-DRB1*01:01L HLA-DPA1*01:03-B1*03:01L HLA-DRB1*11:01L HLA-DPA1*01:03-B1*104:01L HLA-DRB1*04:08L HLA-DRB1*15:03L
  source 1..14: note = Severe acute respiratory syndrome coronavirus 2
RQKRTATKAYNVTQ

SEQ ID NO: 19206 - protein, 11 aa, Severe acute respiratory syndrome-related coronavirus
  REGION 1..11: note = Table B: HLA-DRB1*01:01L HLA-DRB1*16:01L
  source 1..11: note = Severe acute respiratory syndrome coronavirus 2
KAYNVTQAFGR

SEQ ID NO: 19207 - protein, 14 aa, Severe acute respiratory syndrome-related coronavirus
  REGION 1..14: note = Table B: HLA-DRB1*01:01L
  source 1..14: note = Severe acute respiratory syndrome coronavirus 2
GTWLTYTGAIKLDD

SEQ ID NO: 19208 - protein, 14 aa, Severe acute respiratory syndrome-related coronavirus
  REGION 1..14: note = Table B: HLA-DRB1*01:01L HLA-DRB1*13:01L HLA-DRB1*07:01L
  source 1..14: note = Severe acute respiratory syndrome coronavirus 2
DQVILLNKHIDAYK

SEQ ID NO: 19209 - protein, 16 aa, Severe acute respiratory syndrome-related coronavirus
  REGION 1..16: note = Table B: HLA-DRB1*01:01L
  source 1..16: note = Severe acute respiratory syndrome coronavirus 2
QQTVTLLPAADLDDFS

SEQ ID NO: 19210 - protein, 12 aa, Severe acute respiratory syndrome-related coronavirus
  REGION 1..12: note = Table B: HLA-DRB1*01:02L HLA-DQA1*05:05-B1*03:19L HLA-DPA1*03:01-B1*105:01L HLA-DQA1*05:05-B1*03:01L
  source 1..12: note = Severe acute respiratory syndrome coronavirus 2
LVPGFNEKTHVQ

SEQ ID NO: 19211 - protein, 13 aa, Severe acute respiratory syndrome-related coronavirus
  REGION 1..13: note = Table B: HLA-DRB1*01:02L HLA-DRB1*12:01L
  source 1..13: note = Severe acute respiratory syndrome coronavirus 2
THVQLSLPVLQVR

SEQ ID NO: 19212 - protein, 14 aa, Severe acute respiratory syndrome-related coronavirus
  REGION 1..14: note = Table B: HLA-DRB1*01:02L
  source 1..14: note = Severe acute respiratory syndrome coronavirus 2
HVQLSLPVLQVRDV

SEQ ID NO: 19213 - protein, 16 aa, Severe acute respiratory syndrome-related coronavirus
  REGION 1..16: note = Table B: HLA-DRB1*01:02L
  source 1..16: note = Severe acute respiratory syndrome coronavirus 2
VRGFGDSVEEVLSEAR

SEQ ID NO: 19214 - protein, 13 aa, Severe acute respiratory syndrome-related coronavirus
  REGION 1..13: note = Table B: HLA-DRB1*01:02L HLA-DRB1*08:04L HLA-DRB3*02:01L HLA-DQA1*01:01-B1*05:01L HLA-DRB1*08:01L HLA-DRB1*04:10L HLA-DRB1*09:01L HLA-DRB1*12:02L HLA-DRB1*14:54L HLA-DRB1*14:17L HLA-DRB1*04:08L
  source 1..13: note = Severe acute respiratory syndrome coronavirus 2
VEKGVLPQLEQPY

SEQ ID NO: 19215 - protein, 13 aa, Severe acute respiratory syndrome-related coronavirus
  REGION 1..13: note = Table B: HLA-DRB1*01:02L HLA-DRB1*08:01L
  source 1..13: note = Severe acute respiratory syndrome coronavirus 2
LPQLEQPYVFIKR

SEQ ID NO: 19216 - protein, 13 aa, Severe acute respiratory syndrome-related coronavirus
  REGION 1..13: note = Table B: HLA-DRB1*01:02L
  source 1..13: note = Severe acute respiratory syndrome coronavirus 2
RSDARTAPHGHVM

SEQ ID NO: 19217 - protein, 15 aa, Severe acute respiratory syndrome-related coronavirus
  REGION 1..15: note = Table B: HLA-DRB1*01:02L HLA-DRB1*12:01L HLA-DPA1*02:01-B1*13:01L HLA-DPA1*01:03-B1*104:01L HLA-DQA1*01:03-B1*06:01L HLA-DRB1*15:03L
  source 1..15: note = Severe acute respiratory syndrome coronavirus 2
APHGHVMVELVAELE

SEQ ID NO: 19218 - protein, 15 aa, Severe acute respiratory syndrome-related coronavirus
  REGION 1..15: note = Table B: HLA-DRB1*01:02L HLA-DPA1*01:03-B1*03:01L HLA-DPA1*03:01-B1*04:02L HLA-DPA1*01:03-B1*04:02L HLA-DQA1*05:05-B1*03:01L
  source 1..15: note = Severe acute respiratory syndrome coronavirus 2
GHVMVELVAELEGIQ

SEQ ID NO: 19219 - protein, 12 aa, Severe acute respiratory syndrome-related coronavirus
  REGION 1..12: note = Table B: HLA-DRB1*01:02L
  source 1..12: note = Severe acute respiratory syndrome coronavirus 2
LVAELEGIQYGR

SEQ ID NO: 19220 - protein, 14 aa, Severe acute respiratory syndrome-related coronavirus
  REGION 1..14: note = Table B: HLA-DRB1*01:02L
  source 1..14: note = Severe acute respiratory syndrome coronavirus 2
AELEGIQYGRSGET

SEQ ID NO: 19221 - protein, 14 aa, Severe acute respiratory syndrome-related coronavirus
  REGION 1..14: note = Table B: HLA-DRB1*01:02L HLA-DQA1*05:05-B1*03:01L
  source 1..14: note = Severe acute respiratory syndrome coronavirus 2
TLGVLVPHVGEIPV

SEQ ID NO: 19222 - protein, 12 aa, Severe acute respiratory syndrome-related coronavirus
  REGION 1..12: note = Table B: HLA-DRB1*01:02L HLA-DRB1*16:01L
  source 1..12: note = Severe acute respiratory syndrome coronavirus 2
PVAYRKVLLRKN

SEQ ID NO: 19223 - protein, 15 aa, Severe acute respiratory syndrome-related coronavirus
  REGION 1..15: note = Table B: HLA-DRB1*01:02L HLA-DRB1*08:01L
  source 1..15: note = Severe acute respiratory syndrome coronavirus 2
GNKGAGGHSYGADLK

SEQ ID NO: 19224 - protein, 12 aa, Severe acute respiratory syndrome-related coronavirus
  REGION 1..12: note = Table B: HLA-DRB1*01:02L HLA-DRB1*04:08L
  source 1..12: note = Severe acute respiratory syndrome coronavirus 2
NWNTKHSSGVTR

SEQ ID NO: 19225 - protein, 12 aa, Severe acute respiratory syndrome-related coronavirus
  REGION 1..12: note = Table B: HLA-DRB1*01:02L HLA-DRB1*04:08L
  source 1..12: note = Severe acute respiratory syndrome coronavirus 2
WNTKHSSGVTRE

SEQ ID NO: 19226 - protein, 14 aa, Severe acute respiratory syndrome-related coronavirus
  REGION 1..14: note = Table B: HLA-DRB1*01:02L
  source 1..14: note = Severe acute respiratory syndrome coronavirus 2
TKHSSGVTRELMRE

SEQ ID NO: 19227 - protein, 14 aa, Severe acute respiratory syndrome-related coronavirus
  REGION 1..14: note = Table B: HLA-DRB1*01:02L HLA-DQA1*05:05-B1*03:01L
  source 1..14: note = Severe acute respiratory syndrome coronavirus 2
DLLARAGKASCTLS

SEQ ID NO: 19228 - protein, 14 aa, Severe acute respiratory syndrome-related coronavirus
  REGION 1..14: note = Table B: HLA-DRB1*01:02L HLA-DPA1*02:01-B1*13:01L
  source 1..14: note = Severe acute respiratory syndrome coronavirus 2
EHEHEIAWYTERSE

SEQ ID NO: 19229 - protein, 12 aa, Severe acute respiratory syndrome-related coronavirus
  REGION 1..12: note = Table B: HLA-DRB1*01:02L HLA-DRB1*04:08L
  source 1..12: note = Severe acute respiratory syndrome coronavirus 2
QTPFEIKLAKKF

SEQ ID NO: 19230 - protein, 14 aa, Severe acute respiratory syndrome-related coronavirus
  REGION 1..14: note = Table B: HLA-DRB1*01:02L HLA-DQA1*05:05-B1*03:19L HLA-DQA1*05:05-B1*03:01L
  source 1..14: note = Severe acute respiratory syndrome coronavirus 2
FDTFNGECPNFVFP

SEQ ID NO: 19231 - protein, 11 aa, Severe acute respiratory syndrome-related coronavirus
  REGION 1..11: note = Table B: HLA-DRB1*01:02L HLA-DRB1*15:03L
  source 1..11: note = Severe acute respiratory syndrome coronavirus 2
FVFPLNSIIKT

SEQ ID NO: 19232 - protein, 14 aa, Severe acute respiratory syndrome-related coronavirus
  REGION 1..14: note = Table B: HLA-DRB1*01:02L
  source 1..14: note = Severe acute respiratory syndrome coronavirus 2
FPLNSIIKTIQPRV

SEQ ID NO: 19233 - protein, 12 aa, Severe acute respiratory syndrome-related coronavirus
  REGION 1..12: note = Table B: HLA-DRB1*01:02L
  source 1..12: note = Severe acute respiratory syndrome coronavirus 2
IKTIQPRVEKKK

SEQ ID NO: 19234 - protein, 13 aa, Severe acute respiratory syndrome-related coronavirus
  REGION 1..13: note = Table B: HLA-DRB1*01:02L HLA-DRB1*16:01L
  source 1..13: note = Severe acute respiratory syndrome coronavirus 2
TIQPRVEKKKLDG

SEQ ID NO: 19235 - protein, 15 aa, Severe acute respiratory syndrome-related coronavirus
  REGION 1..15: note = Table B: HLA-DRB1*01:02L HLA-DRB1*16:01L
  source 1..15: note = Severe acute respiratory syndrome coronavirus 2
IQPRVEKKKLDGFMG

SEQ ID NO: 19236 - protein, 15 aa, Severe acute respiratory syndrome-related coronavirus
  REGION 1..15: note = Table B: HLA-DRB1*01:02L
  source 1..15: note = Severe acute respiratory syndrome coronavirus 2
QPRVEKKKLDGFMGR

SEQ ID NO: 19237 - protein, 12 aa, Severe acute respiratory syndrome-related coronavirus
  REGION 1..12: note = Table B: HLA-DRB1*01:02L
  source 1..12: note = Severe acute respiratory syndrome coronavirus 2
KKKLDGFMGRIR

SEQ ID NO: 19238 - protein, 16 aa, Severe acute respiratory syndrome-related coronavirus
  REGION 1..16: note = Table B: HLA-DRB1*01:02L
  source 1..16: note = Severe acute respiratory syndrome coronavirus 2
KKLDGFMGRIRSVYPV

SEQ ID NO: 19239 - protein, 15 aa, Severe acute respiratory syndrome-related coronavirus
  REGION 1..15: note = Table B: HLA-DRB1*01:02L HLA-DRB1*14:01L
  source 1..15: note = Severe acute respiratory syndrome coronavirus 2
LDGFMGRIRSVYPVA

SEQ ID NO: 19240 - protein, 11 aa, Severe acute respiratory syndrome-related coronavirus
  REGION 1..11: note = Table B: HLA-DRB1*01:02L HLA-DPA1*01:03-B1*03:01L HLA-DRB1*12:01L HLA-DPA1*01:03-B1*02:01L HLA-DRB1*15:03L
  source 1..11: note = Severe acute respiratory syndrome coronavirus 2
SWQTGDFVKAT

SEQ ID NO: 19241 - protein, 14 aa, Severe acute respiratory syndrome-related coronavirus
  REGION 1..14: note = Table B: HLA-DRB1*01:02L HLA-DRB1*15:03L
  source 1..14: note = Severe acute respiratory syndrome coronavirus 2
TGDFVKATCEFCGT

SEQ ID NO: 19242 - protein, 14 aa, Severe acute respiratory syndrome-related coronavirus
  REGION 1..14: note = Table B: HLA-DRB1*01:02L HLA-DRB1*15:03L
  source 1..14: note = Severe acute respiratory syndrome coronavirus 2
GTENLTKEGATTCG

SEQ ID NO: 19243 - protein, 14 aa, Severe acute respiratory syndrome-related coronavirus
  REGION 1..14: note = Table B: HLA-DRB1*01:02L HLA-DRB1*15:03L
  source 1..14: note = Severe acute respiratory syndrome coronavirus 2
TENLTKEGATTCGY

SEQ ID NO: 19244 - protein, 14 aa, Severe acute respiratory syndrome-related coronavirus
  REGION 1..14: note = Table B: HLA-DRB1*01:02L
  source 1..14: note = Severe acute respiratory syndrome coronavirus 2
ENLTKEGATTCGYL

SEQ ID NO: 19245 - protein, 14 aa, Severe acute respiratory syndrome-related coronavirus
  REGION 1..14: note = Table B: HLA-DRB1*01:02L
  source 1..14: note = Severe acute respiratory syndrome coronavirus 2
HNESGLKTILRKGG

SEQ ID NO: 19246 - protein, 12 aa, Severe acute respiratory syndrome-related coronavirus
  REGION 1..12: note = Table B: HLA-DRB1*01:02L HLA-DRB1*14:01L HLA-DRB1*11:04L HLA-DRB1*08:01L HLA-DRB1*11:01L
  source 1..12: note = Severe acute respiratory syndrome coronavirus 2
SGLKTILRKGGR

SEQ ID NO: 19247 - protein, 14 aa, Severe acute respiratory syndrome-related coronavirus
  REGION 1..14: note = Table B: HLA-DRB1*01:02L HLA-DRB1*08:01L
  source 1..14: note = Severe acute respiratory syndrome coronavirus 2
HNKCAYWVPRASAN

SEQ ID NO: 19248 - protein, 14 aa, Severe acute respiratory syndrome-related coronavirus
  REGION 1..14: note = Table B: HLA-DRB1*01:02L
  source 1..14: note = Severe acute respiratory syndrome coronavirus 2
ANIGCNHTGVVGEG

SEQ ID NO: 19249 - protein, 15 aa, Severe acute respiratory syndrome-related coronavirus
  REGION 1..15: note = Table B: HLA-DRB1*01:02L HLA-DRB1*15:03L
  source 1..15: note = Severe acute respiratory syndrome coronavirus 2
GSEGLNDNLLEILQK

SEQ ID NO: 19250 - protein, 15 aa, Severe acute respiratory syndrome-related coronavirus
  REGION 1..15: note = Table B: HLA-DRB1*01:02L HLA-DPA1*01:03-B1*04:02L HLA-DRB1*16:01L HLA-DRB1*15:03L
  source 1..15: note = Severe acute respiratory syndrome coronavirus 2
SEGLNDNLLEILQKE

SEQ ID NO: 19251 - protein, 13 aa, Severe acute respiratory syndrome-related coronavirus
  REGION 1..13: note = Table B: HLA-DRB1*01:02L HLA-DRB1*16:01L
  source 1..13: note = Severe acute respiratory syndrome coronavirus 2
LNDNLLEILQKEK

SEQ ID NO: 19252 - protein, 13 aa, Severe acute respiratory syndrome-related coronavirus
  REGION 1..13: note = Table B: HLA-DRB1*01:02L
  source 1..13: note = Severe acute respiratory syndrome coronavirus 2
EKVNINIVGDFKL

SEQ ID NO: 19253 - protein, 13 aa, Severe acute respiratory syndrome-related coronavirus
  REGION 1..13: note = Table B: HLA-DRB1*01:02L HLA-DPA1*01:03-B1*03:01L
  source 1..13: note = Severe acute respiratory syndrome coronavirus 2
GDFKLNEEIAIIL

SEQ ID NO: 19254 - protein, 12 aa, Severe acute respiratory syndrome-related coronavirus
  REGION 1..12: note = Table B: HLA-DRB1*01:02L
  source 1..12: note = Severe acute respiratory syndrome coronavirus 2
KLNEEIAIILAS

SEQ ID NO: 19255 - protein, 13 aa, Severe acute respiratory syndrome-related coronavirus
  REGION 1..13: note = Table B: HLA-DRB1*01:02L HLA-DRB1*16:01L
  source 1..13: note = Severe acute respiratory syndrome coronavirus 2
AIILASFSASTSA

SEQ ID NO: 19256 - protein, 13 aa, Severe acute respiratory syndrome-related coronavirus
  REGION 1..13: note = Table B: HLA-DRB1*01:02L HLA-DRB1*12:01L HLA-DQA1*03:01-B1*03:02L
  source 1..13: note = Severe acute respiratory syndrome coronavirus 2
IILASFSASTSAF

SEQ ID NO: 19257 - protein, 12 aa, Severe acute respiratory syndrome-related coronavirus
  REGION 1..12: note = Table B: HLA-DRB1*01:02L HLA-DRB1*08:04L HLA-DRB3*02:01L HLA-DRB1*11:04L HLA-DRB1*04:08L
  source 1..12: note = Severe acute respiratory syndrome coronavirus 2
SAFVETVKGLDY

SEQ ID NO: 19258 - protein, 12 aa, Severe acute respiratory syndrome-related coronavirus
  REGION 1..12: note = Table B: HLA-DRB1*01:02L HLA-DRB1*15:03L
  source 1..12: note = Severe acute respiratory syndrome coronavirus 2
QIVESCGNFKVT

SEQ ID NO: 19259 - protein, 12 aa, Severe acute respiratory syndrome-related coronavirus
  REGION 1..12: note = Table B: HLA-DRB1*01:02L
  source 1..12: note = Severe acute respiratory syndrome coronavirus 2
IVESCGNFKVTK

SEQ ID NO: 19260 - protein, 16 aa, Severe acute respiratory syndrome-related coronavirus
  REGION 1..16: note = Table B: HLA-DRB1*01:02L
  source 1..16: note = Severe acute respiratory syndrome coronavirus 2
VTKGKAKKGAWNIGEQ

SEQ ID NO: 19261 - protein, 14 aa, Severe acute respiratory syndrome-related coronavirus
  REGION 1..14: note = Table B: HLA-DRB1*01:02L
  source 1..14: note = Severe acute respiratory syndrome coronavirus 2
KAKKGAWNIGEQKS

SEQ ID NO: 19262 - protein, 15 aa, Severe acute respiratory syndrome-related coronavirus
  REGION 1..15: note = Table B: HLA-DRB1*01:02L
  source 1..15: note = Severe acute respiratory syndrome coronavirus 2
AKKGAWNIGEQKSIL

SEQ ID NO: 19263 - protein, 13 aa, Severe acute respiratory syndrome-related coronavirus
  REGION 1..13: note = Table B: HLA-DRB1*01:02L HLA-DRB1*12:01L HLA-DPA1*03:01-B1*105:01L HLA-DQA1*05:05-B1*03:01L HLA-DRB1*15:03L
  source 1..13: note = Severe acute respiratory syndrome coronavirus 2
WNIGEQKSILSPL

SEQ ID NO: 19264 - protein, 11 aa, Severe acute respiratory syndrome-related coronavirus
  REGION 1..11: note = Table B: HLA-DRB1*01:02L HLA-DRB1*08:77L HLA-DRB3*02:01L
  source 1..11: note = Severe acute respiratory syndrome coronavirus 2
YAFASEAARVV

SEQ ID NO: 19265 - protein, 14 aa, Severe acute respiratory syndrome-related coronavirus
  REGION 1..14: note = Table B: HLA-DRB1*01:02L
  source 1..14: note = Severe acute respiratory syndrome coronavirus 2
ASEAARVVRSIFSR

SEQ ID NO: 19266 - protein, 14 aa, Severe acute respiratory syndrome-related coronavirus
  REGION 1..14: note = Table B: HLA-DRB1*01:02L
  source 1..14: note = Severe acute respiratory syndrome coronavirus 2
SEAARVVRSIFSRT

SEQ ID NO: 19267 - protein, 11 aa, Severe acute respiratory syndrome-related coronavirus
  REGION 1..11: note = Table B: HLA-DRB1*01:02L HLA-DRB1*12:01L HLA-DRB1*15:03L
  source 1..11: note = Severe acute respiratory syndrome coronavirus 2
RVVRSIFSRTL

SEQ ID NO: 19268 - protein, 11 aa, Severe acute respiratory syndrome-related coronavirus
  REGION 1..11: note = Table B: HLA-DRB1*01:02L HLA-DRB1*15:03L
  source 1..11: note = Severe acute respiratory syndrome coronavirus 2
VVRSIFSRTLE

SEQ ID NO: 19269 - protein, 13 aa, Severe acute respiratory syndrome-related coronavirus
  REGION 1..13: note = Table B: HLA-DRB1*01:02L HLA-DPA1*01:03-B1*03:01L HLA-DPA1*02:01-B1*13:01L HLA-DRB1*15:03L
  source 1..13: note = Severe acute respiratory syndrome coronavirus 2
SVRVLQKAAITIL

SEQ ID NO: 19270 - protein, 12 aa, Severe acute respiratory syndrome-related coronavirus
  REGION 1..12: note = Table B: HLA-DRB1*01:02L HLA-DRB3*02:01L
  source 1..12: note = Severe acute respiratory syndrome coronavirus 2
AAITILDGISQY

SEQ ID NO: 19271 - protein, 13 aa, Severe acute respiratory syndrome-related coronavirus
  REGION 1..13: note = Table B: HLA-DRB1*01:02L
  source 1..13: note = Severe acute respiratory syndrome coronavirus 2
LDGISQYSLRLID

SEQ ID NO: 19272 - protein, 12 aa, Severe acute respiratory syndrome-related coronavirus
  REGION 1..12: note = Table B: HLA-DRB1*01:02L
  source 1..12: note = Severe acute respiratory syndrome coronavirus 2
YSLRLIDAMMFT

SEQ ID NO: 19273 - protein, 12 aa, Severe acute respiratory syndrome-related coronavirus
  REGION 1..12: note = Table B: HLA-DRB1*01:02L HLA-DRB1*14:01L HLA-DRB1*12:01L
  source 1..12: note = Severe acute respiratory syndrome coronavirus 2
LRLIDAMMFTSD

SEQ ID NO: 19274 - protein, 14 aa, Severe acute respiratory syndrome-related coronavirus
  REGION 1..14: note = Table B: HLA-DRB1*01:02L
  source 1..14: note = Severe acute respiratory syndrome coronavirus 2
TSDLATNNLVVMAY

SEQ ID NO: 19275 - protein, 12 aa, Severe acute respiratory syndrome-related coronavirus
  REGION 1..12: note = Table B: HLA-DRB1*01:02L
  source 1..12: note = Severe acute respiratory syndrome coronavirus 2
VYEKLKPVLDWL

SEQ ID NO: 19276 - protein, 13 aa, Severe acute respiratory syndrome-related coronavirus
  REGION 1..13: note = Table B: HLA-DRB1*01:02L HLA-DRB1*12:01L HLA-DRB1*16:01L HLA-DRB1*04:08L
  source 1..13: note = Severe acute respiratory syndrome coronavirus 2
PVLDWLEEKFKEG

SEQ ID NO: 19277 - protein, 12 aa, Severe acute respiratory syndrome-related coronavirus
  REGION 1..12: note = Table B: HLA-DRB1*01:02L HLA-DRB1*08:04L HLA-DRB1*08:01L HLA-DRB1*11:01L HLA-DRB1*12:01L HLA-DPA1*02:01-B1*13:01L HLA-DPA1*01:03-B1*02:01L HLA-DQA1*01:03-B1*06:01L HLA-DQA1*02:01-B1*03:03L HLA-DRB1*15:03L
  source 1..12: note = Severe acute respiratory syndrome coronavirus 2
DWLEEKFKEGVE

SEQ ID NO: 19278 - protein, 13 aa, Severe acute respiratory syndrome-related coronavirus
  REGION 1..13: note = Table B: HLA-DRB1*01:02L
  source 1..13: note = Severe acute respiratory syndrome coronavirus 2
EEKFKEGVEFLRD

SEQ ID NO: 19279 - protein, 13 aa, Severe acute respiratory syndrome-related coronavirus
  REGION 1..13: note = Table B: HLA-DRB1*01:02L HLA-DPA1*01:03-B1*03:01L HLA-DPA1*03:01-B1*04:02L HLA-DQA1*05:01-B1*02:01L
  source 1..13: note = Severe acute respiratory syndrome coronavirus 2
FKEGVEFLRDGWE

SEQ ID NO: 19280 - protein, 14 aa, Severe acute respiratory syndrome-related coronavirus
  REGION 1..14: note = Table B: HLA-DRB1*01:02L HLA-DRB1*15:03L
  source 1..14: note = Severe acute respiratory syndrome coronavirus 2
VKFISTCACEIVGG

SEQ ID NO: 19281 - protein, 14 aa, Severe acute respiratory syndrome-related coronavirus
  REGION 1..14: note = Table B: HLA-DRB1*01:02L HLA-DPA1*01:03-B1*04:02L
  source 1..14: note = Severe acute respiratory syndrome coronavirus 2
KFISTCACEIVGGQ

SEQ ID NO: 19282 - protein, 14 aa, Severe acute respiratory syndrome-related coronavirus
  REGION 1..14: note = Table B: HLA-DRB1*01:02L HLA-DRB1*08:04L HLA-DRB1*14:01L HLA-DPA1*03:01-B1*105:01L HLA-DRB1*15:03L
  source 1..14: note = Severe acute respiratory syndrome coronavirus 2
QIVTCAKEIKESVQ

SEQ ID NO: 19283 - protein, 12 aa, Severe acute respiratory syndrome-related coronavirus
  REGION 1..12: note = Table B: HLA-DRB1*01:02L
  source 1..12: note = Severe acute respiratory syndrome coronavirus 2
KEIKESVQTFFK

SEQ ID NO: 19284 - protein, 14 aa, Severe acute respiratory syndrome-related coronavirus
  REGION 1..14: note = Table B: HLA-DRB1*01:02L
  source 1..14: note = Severe acute respiratory syndrome coronavirus 2
EIKESVQTFFKLVN

SEQ ID NO: 19285 - protein, 12 aa, Severe acute respiratory syndrome-related coronavirus
  REGION 1..12: note = Table B: HLA-DRB1*01:02L HLA-DRB1*14:01L HLA-DRB1*08:01L HLA-DRB1*12:01L HLA-DRB1*04:08L
  source 1..12: note = Severe acute respiratory syndrome coronavirus 2
QTFFKLVNKFLA

SEQ ID NO: 19286 - protein, 11 aa, Severe acute respiratory syndrome-related coronavirus
  REGION 1..11: note = Table B: HLA-DRB1*01:02L HLA-DRB1*14:02L
  source 1..11: note = Severe acute respiratory syndrome coronavirus 2
FFKLVNKFLAL

SEQ ID NO: 19287 - protein, 13 aa, Severe acute respiratory syndrome-related coronavirus
  REGION 1..13: note = Table B: HLA-DRB1*01:02L HLA-DPA1*03:01-B1*04:02L HLA-DRB1*12:01L HLA-DPA1*02:01-B1*13:01L HLA-DPA1*03:01-B1*105:01L HLA-DRB1*16:01L HLA-DRB1*15:03L
  source 1..13: note = Severe acute respiratory syndrome coronavirus 2
VNKFLALCADSII

SEQ ID NO: 19288 - protein, 14 aa, Severe acute respiratory syndrome-related coronavirus
  REGION 1..14: note = Table B: HLA-DRB1*01:02L HLA-DRB1*12:01L HLA-DRB1*16:01L
  source 1..14: note = Severe acute respiratory syndrome coronavirus 2
NKFLALCADSIIIG

SEQ ID NO: 19289 - protein, 14 aa, Severe acute respiratory syndrome-related coronavirus
  REGION 1..14: note = Table B: HLA-DRB1*01:02L
  source 1..14: note = Severe acute respiratory syndrome coronavirus 2
KFLALCADSIIIGG

SEQ ID NO: 19290 - protein, 14 aa, Severe acute respiratory syndrome-related coronavirus
  REGION 1..14: note = Table B: HLA-DRB1*01:02L HLA-DPA1*01:03-B1*03:01L HLA-DRB1*12:01L HLA-DPA1*03:01-B1*105:01L
  source 1..14: note = Severe acute respiratory syndrome coronavirus 2
AKLKALNLGETFVT

SEQ ID NO: 19291 - protein, 13 aa, Severe acute respiratory syndrome-related coronavirus
  REGION 1..13: note = Table B: HLA-DRB1*01:02L HLA-DQA1*05:05-B1*03:19L
  source 1..13: note = Severe acute respiratory syndrome coronavirus 2
LNLGETFVTHSKG

SEQ ID NO: 19292 - protein, 13 aa, Severe acute respiratory syndrome-related coronavirus
  REGION 1..13: note = Table B: HLA-DRB1*01:02L
  source 1..13: note = Severe acute respiratory syndrome coronavirus 2
SKGLYRKCVKSRE

SEQ ID NO: 19293 - protein, 13 aa, Severe acute respiratory syndrome-related coronavirus
  REGION 1..13: note = Table B: HLA-DRB1*01:02L
  source 1..13: note = Severe acute respiratory syndrome coronavirus 2
KGLYRKCVKSREE

SEQ ID NO: 19294 - protein, 13 aa, Severe acute respiratory syndrome-related coronavirus
  REGION 1..13: note = Table B: HLA-DRB1*01:02L HLA-DRB1*12:01L
  source 1..13: note = Severe acute respiratory syndrome coronavirus 2
PKEIIFLEGETLP

SEQ ID NO: 19295 - protein, 17 aa, Severe acute respiratory syndrome-related coronavirus
  REGION 1..17: note = Table B: HLA-DRB1*01:02L HLA-DRB1*08:01L HLA-DRB1*04:10L HLA-DRB1*15:03L
  source 1..17: note = Severe acute respiratory syndrome coronavirus 2
QPLEQPTSEAVEAPLVG

SEQ ID NO: 19296 - protein, 13 aa, Severe acute respiratory syndrome-related coronavirus
  REGION 1..13: note = Table B: HLA-DRB1*01:02L HLA-DPA1*03:01-B1*105:01L HLA-DRB1*16:01L HLA-DRB1*15:03L
  source 1..13: note = Severe acute respiratory syndrome coronavirus 2
EKYCALAPNMMVT

SEQ ID NO: 19297 - protein, 13 aa, Severe acute respiratory syndrome-related coronavirus
  REGION 1..13: note = Table B: HLA-DRB1*01:02L
  source 1..13: note = Severe acute respiratory syndrome coronavirus 2
LAPNMMVTNNTFT

SEQ ID NO: 19298 - protein, 12 aa, Severe acute respiratory syndrome-related coronavirus
  REGION 1..12: note = Table B: HLA-DRB1*01:02L
  source 1..12: note = Severe acute respiratory syndrome coronavirus 2
MMVTNNTFTLKG

SEQ ID NO: 19299 - protein, 13 aa, Severe acute respiratory syndrome-related coronavirus
  REGION 1..13: note = Table B: HLA-DRB1*01:02L HLA-DPA1*02:01-B1*13:01L HLA-DPA1*01:02-B1*04:01L
  source 1..13: note = Severe acute respiratory syndrome coronavirus 2
FGDDTVIEVQGYK

SEQ ID NO: 19300 - protein, 13 aa, Severe acute respiratory syndrome-related coronavirus
  REGION 1..13: note = Table B: HLA-DRB1*01:02L HLA-DRB1*15:03L
  source 1..13: note = Severe acute respiratory syndrome coronavirus 2
ERIDKVLNEKCSA

SEQ ID NO: 19301 - protein, 13 aa, Severe acute respiratory syndrome-related coronavirus
  REGION 1..13: note = Table B: HLA-DRB1*01:02L HLA-DPA1*01:03-B1*03:01L HLA-DRB1*14:01L HLA-DRB1*12:01L HLA-DPA1*02:01-B1*13:01L HLA-DPA1*03:01-B1*105:01L HLA-DQA1*03:01-B1*03:02L HLA-DRB1*16:01L HLA-DQA1*01:03-B1*06:01L HLA-DRB1*15:03L
  source 1..13: note = Severe acute respiratory syndrome coronavirus 2
IDKVLNEKCSAYT

SEQ ID NO: 19302 - protein, 14 aa, Severe acute respiratory syndrome-related coronavirus
  REGION 1..14: note = Table B: HLA-DRB1*01:02L HLA-DPA1*03:01-B1*105:01L HLA-DQA1*01:03-B1*06:01L HLA-DRB1*15:03L
  source 1..14: note = Severe acute respiratory syndrome coronavirus 2
DKVLNEKCSAYTVE

SEQ ID NO: 19303 - protein, 12 aa, Severe acute respiratory syndrome-related coronavirus
  REGION 1..12: note = Table B: HLA-DRB1*01:02L HLA-DRB1*12:01L HLA-DRB1*10:01L HLA-DRB1*16:01L HLA-DRB1*15:03L
  source 1..12: note = Severe acute respiratory syndrome coronavirus 2
AYTVELGTEVNE

SEQ ID NO: 19304 - protein, 13 aa, Severe acute respiratory syndrome-related coronavirus
  REGION 1..13: note = Table B: HLA-DRB1*01:02L
  source 1..13: note = Severe acute respiratory syndrome coronavirus 2
YTVELGTEVNEFA

SEQ ID NO: 19305 - protein, 15 aa, Severe acute respiratory syndrome-related coronavirus
  REGION 1..15: note = Table B: HLA-DRB1*01:02L HLA-DPA1*01:03-B1*03:01L HLA-DRB1*12:01L HLA-DPA1*02:01-B1*13:01L HLA-DQA1*05:05-B1*03:01L HLA-DRB1*04:08L HLA-DRB1*15:03L
  source 1..15: note = Severe acute respiratory syndrome coronavirus 2
QPVSELLTPLGIDLD

SEQ ID NO: 19306 - protein, 12 aa, Severe acute respiratory syndrome-related coronavirus
  REGION 1..12: note = Table B: HLA-DRB1*01:02L HLA-DRB1*12:01L HLA-DRB1*04:08L
  source 1..12: note = Severe acute respiratory syndrome coronavirus 2
FDESGEFKLASH

SEQ ID NO: 19307 - protein, 13 aa, Severe acute respiratory syndrome-related coronavirus
  REGION 1..13: note = Table B: HLA-DRB1*01:02L HLA-DRB1*08:04L HLA-DRB3*02:01L HLA-DRB1*08:01L HLA-DRB1*04:08L
  source 1..13: note = Severe acute respiratory syndrome coronavirus 2
DESGEFKLASHMY

SEQ ID NO: 19308 - protein, 14 aa, Severe acute respiratory syndrome-related coronavirus
  REGION 1..14: note = Table B: HLA-DRB1*01:02L
  source 1..14: note = Severe acute respiratory syndrome coronavirus 2
ESGEFKLASHMYCS

SEQ ID NO: 19309 - protein, 16 aa, Severe acute respiratory syndrome-related coronavirus
  REGION 1..16: note = Table B: HLA-DRB1*01:02L HLA-DPA1*01:03-B1*02:01L HLA-DRB1*04:08L
  source 1..16: note = Severe acute respiratory syndrome coronavirus 2
GEFKLASHMYCSFYPP

SEQ ID NO: 19310 - protein, 12 aa, Severe acute respiratory syndrome-related coronavirus
  REGION 1..12: note = Table B: HLA-DRB1*01:02L HLA-DRB3*02:01L HLA-DRB1*14:01L HLA-DRB1*08:01L HLA-DPA1*01:03-B1*04:01L HLA-DRB1*04:10L HLA-DRB1*12:02L HLA-DPA1*02:01-B1*13:01L HLA-DRB1*14:54L HLA-DRB1*07:01L HLA-DRB1*10:01L HLA-DRB1*04:08L
  source 1..12: note = Severe acute respiratory syndrome coronavirus 2
GTEDDYQGKPLE

SEQ ID NO: 19311 - protein, 13 aa, Severe acute respiratory syndrome-related coronavirus
  REGION 1..13: note = Table B: HLA-DRB1*01:02L HLA-DRB1*08:04L
  source 1..13: note = Severe acute respiratory syndrome coronavirus 2
TEDDYQGKPLEFG

SEQ ID NO: 19312 - protein, 14 aa, Severe acute respiratory syndrome-related coronavirus
  REGION 1..14: note = Table B: HLA-DRB1*01:02L
  source 1..14: note = Severe acute respiratory syndrome coronavirus 2
EFGATSAALQPEEE

SEQ ID NO: 19313 - protein, 16 aa, Severe acute respiratory syndrome-related coronavirus
  REGION 1..16: note = Table B: HLA-DRB1*01:02L HLA-DPA1*01:03-B1*04:02L
  source 1..16: note = Severe acute respiratory syndrome coronavirus 2
EEDWLDDDSQQTVGQQ

SEQ ID NO: 19314 - protein, 12 aa, Severe acute respiratory syndrome-related coronavirus
  REGION 1..12: note = Table B: HLA-DRB1*01:02L HLA-DPA1*01:03-B1*03:01L
  source 1..12: note = Severe acute respiratory syndrome coronavirus 2
TIVEVQPQLEME

SEQ ID NO: 19315 - protein, 12 aa, Severe acute respiratory syndrome-related coronavirus
  REGION 1..12: note = Table B: HLA-DRB1*01:02L HLA-DRB3*02:01L HLA-DRB1*12:02L HLA-DQA1*03:01-B1*03:02L HLA-DQA1*05:05-B1*03:01L
  source 1..12: note = Severe acute respiratory syndrome coronavirus 2
VQTIEVNSFSGY

SEQ ID NO: 19316 - protein, 11 aa, Severe acute respiratory syndrome-related coronavirus
  REGION 1..11: note = Table B: HLA-DRB1*01:02L HLA-DRB3*02:01L
  source 1..11: note = Severe acute respiratory syndrome coronavirus 2
SGYLKLTDNVY

SEQ ID NO: 19317 - protein, 11 aa, Severe acute respiratory syndrome-related coronavirus
  REGION 1..11: note = Table B: HLA-DRB1*01:02L
  source 1..11: note = Severe acute respiratory syndrome coronavirus 2
GYLKLTDNVYI

SEQ ID NO: 19318 - protein, 10 aa, Severe acute respiratory syndrome-related coronavirus
  REGION 1..10: note = Table B: HLA-DRB1*01:02L HLA-DRB1*12:01L HLA-DRB1*16:01L HLA-DQA1*02:01-B1*03:03L HLA-DRB1*15:03L
  source 1..10: note = Severe acute respiratory syndrome coronavirus 2
LKLTDNVYIK

SEQ ID NO: 19319 - protein, 14 aa, Severe acute respiratory syndrome-related coronavirus
  REGION 1..14: note = Table B: HLA-DRB1*01:02L
  source 1..14: note = Severe acute respiratory syndrome coronavirus 2
KNADIVEEAKKVKP

SEQ ID NO: 19320 - protein, 12 aa, Severe acute respiratory syndrome-related coronavirus
  REGION 1..12: note = Table B: HLA-DRB1*01:02L HLA-DPA1*01:03-B1*03:01L HLA-DRB1*08:01L HLA-DPA1*01:03-B1*04:02L
  source 1..12: note = Severe acute respiratory syndrome coronavirus 2
GVAGALNKATNN

SEQ ID NO: 19321 - protein, 15 aa, Severe acute respiratory syndrome-related coronavirus
  REGION 1..15: note = Table B: HLA-DRB1*01:02L HLA-DRB1*04:10L HLA-DRB1*12:01L
  source 1..15: note = Severe acute respiratory syndrome coronavirus 2
LNKATNNAMQVESDD

SEQ ID NO: 19322 - protein, 14 aa, Severe acute respiratory syndrome-related coronavirus
  REGION 1..14: note = Table B: HLA-DRB1*01:02L HLA-DRB1*08:01L
  source 1..14: note = Severe acute respiratory syndrome coronavirus 2
HNLAKHCLHVVGPN

SEQ ID NO: 19323 - protein, 14 aa, Severe acute respiratory syndrome-related coronavirus
  REGION 1..14: note = Table B: HLA-DRB1*01:02L HLA-DPA1*02:01-B1*13:01L
  source 1..14: note = Severe acute respiratory syndrome coronavirus 2
LAKHCLHVVGPNVN

SEQ ID NO: 19324 - protein, 14 aa, Severe acute respiratory syndrome-related coronavirus
  REGION 1..14: note = Table B: HLA-DRB1*01:02L HLA-DRB1*04:08L
  source 1..14: note = Severe acute respiratory syndrome coronavirus 2
AKHCLHVVGPNVNK

SEQ ID NO: 19325 - protein, 13 aa, Severe acute respiratory syndrome-related coronavirus
  REGION 1..13: note = Table B: HLA-DRB1*01:02L HLA-DQA1*05:05-B1*03:19L HLA-DPA1*03:01-B1*105:01L
  source 1..13: note = Severe acute respiratory syndrome coronavirus 2
LHVVGPNVNKGED

SEQ ID NO: 19326 - protein, 13 aa, Severe acute respiratory syndrome-related coronavirus
  REGION 1..13: note = Table B: HLA-DRB1*01:02L HLA-DRB1*08:04L HLA-DRB1*08:77L HLA-DRB3*02:01L HLA-DPA1*03:01-B1*04:02L HLA-DRB1*14:01L HLA-DRB1*11:03L HLA-DRB1*11:04L HLA-DRB1*14:02L HLA-DRB1*08:01L HLA-DRB1*11:01L HLA-DRB5*01:01L HLA-DPA1*01:03-B1*04:01L
  REGION 1..13: note = CONT. FROM ABOVE: HLA-DQA1*05:05-B1*03:116L HLA-DRB1*04:10L HLA- DRB1*09:01L HLA-DPA1*01:03-B1*04:02L HLA-DRB1*12:02L HLA-DRB3*01 :01L HLA-DPA1*02:01-B1*13:01L HLA-DPA1*01:03-B1*104:01L HLA-DPA1 *01:02-B1*04:01L HLA-DRB1*07:01L HLA-DRB1*10:01L HLA-DRB1*04:08L
  REGION 1..13: note = CONT. FROM ABOVE: HLA-DRB1*08:03L HLA-DRB1*15:03L
  source 1..13: note = Severe acute respiratory syndrome coronavirus 2
VVGPNVNKGEDIQ

SEQ ID NO: 19327 - protein, 14 aa, Severe acute respiratory syndrome-related coronavirus
  REGION 1..14: note = Table B: HLA-DRB1*01:02L HLA-DRB1*15:03L
  source 1..14: note = Severe acute respiratory syndrome coronavirus 2
NFNQHEVLLAPLLS

SEQ ID NO: 19328 - protein, 13 aa, Severe acute respiratory syndrome-related coronavirus
  REGION 1..13: note = Table B: HLA-DRB1*01:02L
  source 1..13: note = Severe acute respiratory syndrome coronavirus 2
VLLAPLLSAGIFG

SEQ ID NO: 19329 - protein, 14 aa, Severe acute respiratory syndrome-related coronavirus
  REGION 1..14: note = Table B: HLA-DRB1*01:02L
  source 1..14: note = Severe acute respiratory syndrome coronavirus 2
SLRVCVDTVRTNVY

SEQ ID NO: 19330 - protein, 14 aa, Severe acute respiratory syndrome-related coronavirus
  REGION 1..14: note = Table B: HLA-DRB1*01:02L HLA-DPA1*01:03-B1*03:01L HLA-DRB1*14:01L HLA-DPA1*01:03-B1*04:02L HLA-DRB1*12:01L HLA-DPA1*02:01-B1*13:01L HLA-DPA1*01:03-B1*104:01L HLA-DQA1*05:05-B1*03:01L
  source 1..14: note = Severe acute respiratory syndrome coronavirus 2
VDTVRTNVYLAVFD

SEQ ID NO: 19331 - protein, 15 aa, Severe acute respiratory syndrome-related coronavirus
  REGION 1..15: note = Table B: HLA-DRB1*01:02L
  source 1..15: note = Severe acute respiratory syndrome coronavirus 2
ITESKPSVEQRKQDD

SEQ ID NO: 19332 - protein, 14 aa, Severe acute respiratory syndrome-related coronavirus
  REGION 1..14: note = Table B: HLA-DRB1*01:02L
  source 1..14: note = Severe acute respiratory syndrome coronavirus 2
PSVEQRKQDDKKIK

SEQ ID NO: 19333 - protein, 11 aa, Severe acute respiratory syndrome-related coronavirus
  REGION 1..11: note = Table B: HLA-DRB1*01:02L HLA-DRB1*03:01L HLA-DRB1*09:01L HLA-DRB1*08:02L
  source 1..11: note = Severe acute respiratory syndrome coronavirus 2
EVTTTLEETKF

SEQ ID NO: 19334 - protein, 12 aa, Severe acute respiratory syndrome-related coronavirus
  REGION 1..12: note = Table B: HLA-DRB1*01:02L HLA-DRB1*14:01L
  source 1..12: note = Severe acute respiratory syndrome coronavirus 2
ETKFLTENLLLY

SEQ ID NO: 19335 - protein, 14 aa, Severe acute respiratory syndrome-related coronavirus
  REGION 1..14: note = Table B: HLA-DRB1*01:02L HLA-DQA1*01-B1*05L HLA-DRB1*16:01L
  source 1..14: note = Severe acute respiratory syndrome coronavirus 2
NLLLYIDINGNLHP

SEQ ID NO: 19336 - protein, 13 aa, Severe acute respiratory syndrome-related coronavirus
  REGION 1..13: note = Table B: HLA-DRB1*01:02L HLA-DPA1*01:03-B1*03:01L HLA-DRB1*15:03L
  source 1..13: note = Severe acute respiratory syndrome coronavirus 2
IDINGNLHPDSAT

SEQ ID NO: 19337 - protein, 14 aa, Severe acute respiratory syndrome-related coronavirus
  REGION 1..14: note = Table B: HLA-DRB1*01:02L HLA-DRB1*16:01L
  source 1..14: note = Severe acute respiratory syndrome coronavirus 2
ATLVSDIDITFLKK

SEQ ID NO: 19338 - protein, 14 aa, Severe acute respiratory syndrome-related coronavirus
  REGION 1..14: note = Table B: HLA-DRB1*01:02L HLA-DRB1*03:01L
  source 1..14: note = Severe acute respiratory syndrome coronavirus 2
TLVSDIDITFLKKD

SEQ ID NO: 19339 - protein, 12 aa, Severe acute respiratory syndrome-related coronavirus
  REGION 1..12: note = Table B: HLA-DRB1*01:02L
  source 1..12: note = Severe acute respiratory syndrome coronavirus 2
GTTEMLAKALRK

SEQ ID NO: 19340 - protein, 14 aa, Severe acute respiratory syndrome-related coronavirus
  REGION 1..14: note = Table B: HLA-DRB1*01:02L HLA-DRB1*12:01L HLA-DRB1*16:01L HLA-DRB1*15:03L
  source 1..14: note = Severe acute respiratory syndrome coronavirus 2
TTEMLAKALRKVPT

SEQ ID NO: 19341 - protein, 14 aa, Severe acute respiratory syndrome-related coronavirus
  REGION 1..14: note = Table B: HLA-DRB1*01:02L
  source 1..14: note = Severe acute respiratory syndrome coronavirus 2
TEMLAKALRKVPTD

SEQ ID NO: 19342 - protein, 14 aa, Severe acute respiratory syndrome-related coronavirus
  REGION 1..14: note = Table B: HLA-DRB1*01:02L HLA-DRB1*08:04L HLA-DRB1*14:01L HLA-DQA1*01:03-B1*06:01L HLA-DRB1*04:08L HLA-DQA1*02:01-B1*03:03L
  source 1..14: note = Severe acute respiratory syndrome coronavirus 2
EMLAKALRKVPTDN

SEQ ID NO: 19343 - protein, 12 aa, Severe acute respiratory syndrome-related coronavirus
  REGION 1..12: note = Table B: HLA-DRB1*01:02L
  source 1..12: note = Severe acute respiratory syndrome coronavirus 2
AKALRKVPTDNY

SEQ ID NO: 19344 - protein, 15 aa, Severe acute respiratory syndrome-related coronavirus
  REGION 1..15: note = Table B: HLA-DRB1*01:02L
  source 1..15: note = Severe acute respiratory syndrome coronavirus 2
KTVLKKCKSAFYILP

SEQ ID NO: 19345 - protein, 14 aa, Severe acute respiratory syndrome-related coronavirus
  REGION 1..14: note = Table B: HLA-DRB1*01:02L HLA-DRB1*08:01L HLA-DRB1*04:08L
  source 1..14: note = Severe acute respiratory syndrome coronavirus 2
VSWNLREMLAHAEE

SEQ ID NO: 19346 - protein, 15 aa, Severe acute respiratory syndrome-related coronavirus
  REGION 1..15: note = Table B: HLA-DRB1*01:02L
  source 1..15: note = Severe acute respiratory syndrome coronavirus 2
RKLMPVCVETKAIVS

SEQ ID NO: 19347 - protein, 16 aa, Severe acute respiratory syndrome-related coronavirus
  REGION 1..16: note = Table B: HLA-DRB1*01:02L
  source 1..16: note = Severe acute respiratory syndrome coronavirus 2
MPVCVETKAIVSTIQR

SEQ ID NO: 19348 - protein, 13 aa, Severe acute respiratory syndrome-related coronavirus
  REGION 1..13: note = Table B: HLA-DRB1*01:02L
  source 1..13: note = Severe acute respiratory syndrome coronavirus 2
VETKAIVSTIQRK

SEQ ID NO: 19349 - protein, 12 aa, Severe acute respiratory syndrome-related coronavirus
  REGION 1..12: note = Table B: HLA-DRB1*01:02L HLA-DRB1*12:01L HLA-DRB1*16:01L HLA-DRB1*15:03L
  source 1..12: note = Severe acute respiratory syndrome coronavirus 2
TIQRKYKGIKIQ

SEQ ID NO: 19350 - protein, 14 aa, Severe acute respiratory syndrome-related coronavirus
  REGION 1..14: note = Table B: HLA-DRB1*01:02L
  source 1..14: note = Severe acute respiratory syndrome coronavirus 2
EGVVDYGARFYFYT

SEQ ID NO: 19351 - protein, 14 aa, Severe acute respiratory syndrome-related coronavirus
  REGION 1..14: note = Table B: HLA-DRB1*01:02L
  source 1..14: note = Severe acute respiratory syndrome coronavirus 2
VVDYGARFYFYTSK

SEQ ID NO: 19352 - protein, 13 aa, Severe acute respiratory syndrome-related coronavirus
  REGION 1..13: note = Table B: HLA-DRB1*01:02L HLA-DPA1*02:01-B1*13:01L
  source 1..13: note = Severe acute respiratory syndrome coronavirus 2
INTLNDLNETLVT

SEQ ID NO: 19353 - protein, 13 aa, Severe acute respiratory syndrome-related coronavirus
  REGION 1..13: note = Table B: HLA-DRB1*01:02L HLA-DRB1*08:01L HLA-DRB1*04:08L
  source 1..13: note = Severe acute respiratory syndrome coronavirus 2
YVTHGLNLEEAAR

SEQ ID NO: 19354 - protein, 12 aa, Severe acute respiratory syndrome-related coronavirus
  REGION 1..12: note = Table B: HLA-DRB1*01:02L HLA-DQA1*05:05-B1*03:01L
  source 1..12: note = Severe acute respiratory syndrome coronavirus 2
THGLNLEEAARY

SEQ ID NO: 19355 - protein, 12 aa, Severe acute respiratory syndrome-related coronavirus
  REGION 1..12: note = Table B: HLA-DRB1*01:02L
  source 1..12: note = Severe acute respiratory syndrome coronavirus 2
HGLNLEEAARYM

SEQ ID NO: 19356 - protein, 12 aa, Severe acute respiratory syndrome-related coronavirus
  REGION 1..12: note = Table B: HLA-DRB1*01:02L
  source 1..12: note = Severe acute respiratory syndrome coronavirus 2
GLNLEEAARYMR

SEQ ID NO: 19357 - protein, 14 aa, Severe acute respiratory syndrome-related coronavirus
  REGION 1..14: note = Table B: HLA-DRB1*01:02L HLA-DRB3*01:01L
  source 1..14: note = Severe acute respiratory syndrome coronavirus 2
LNLEEAARYMRSLK

SEQ ID NO: 19358 - protein, 14 aa, Severe acute respiratory syndrome-related coronavirus
  REGION 1..14: note = Table B: HLA-DRB1*01:02L HLA-DRB1*12:01L
  source 1..14: note = Severe acute respiratory syndrome coronavirus 2
PDAVTAYNGYLTSS

SEQ ID NO: 19359 - protein, 13 aa, Severe acute respiratory syndrome-related coronavirus
  REGION 1..13: note = Table B: HLA-DRB1*01:02L HLA-DRB1*14:17L
  source 1..13: note = Severe acute respiratory syndrome coronavirus 2
AVTAYNGYLTSSS

SEQ ID NO: 19360 - protein, 14 aa, Severe acute respiratory syndrome-related coronavirus
  REGION 1..14: note = Table B: HLA-DRB1*01:02L HLA-DPA1*03:01-B1*105:01L
  source 1..14: note = Severe acute respiratory syndrome coronavirus 2
SLAGSYKDWSYSGQ

SEQ ID NO: 19361 - protein, 14 aa, Severe acute respiratory syndrome-related coronavirus
  REGION 1..14: note = Table B: HLA-DRB1*01:02L HLA-DQA1*01:03-B1*06:01L
  source 1..14: note = Severe acute respiratory syndrome coronavirus 2
LAGSYKDWSYSGQS

SEQ ID NO: 19362 - protein, 14 aa, Severe acute respiratory syndrome-related coronavirus
  REGION 1..14: note = Table B: HLA-DRB1*01:02L HLA-DRB1*08:01L HLA-DPA1*01:03-B1*04:02L
  source 1..14: note = Severe acute respiratory syndrome coronavirus 2
AGSYKDWSYSGQST

SEQ ID NO: 19363 - protein, 14 aa, Severe acute respiratory syndrome-related coronavirus
  REGION 1..14: note = Table B: HLA-DRB1*01:02L
  source 1..14: note = Severe acute respiratory syndrome coronavirus 2
SGQSTQLGIEFLKR

SEQ ID NO: 19364 - protein, 14 aa, Severe acute respiratory syndrome-related coronavirus
  REGION 1..14: note = Table B: HLA-DRB1*01:02L
  source 1..14: note = Severe acute respiratory syndrome coronavirus 2
GQSTQLGIEFLKRG

SEQ ID NO: 19365 - protein, 13 aa, Severe acute respiratory syndrome-related coronavirus
  REGION 1..13: note = Table B: HLA-DRB1*01:02L HLA-DRB1*14:01L HLA-DRB1*12:01L HLA-DRB1*04:08L HLA-DRB1*15:03L
  source 1..13: note = Severe acute respiratory syndrome coronavirus 2
GIEFLKRGDKSVY

SEQ ID NO: 19366 - protein, 14 aa, Severe acute respiratory syndrome-related coronavirus
  REGION 1..14: note = Table B: HLA-DRB1*01:02L HLA-DRB1*14:01L HLA-DRB1*15:03L
  source 1..14: note = Severe acute respiratory syndrome coronavirus 2
IEFLKRGDKSVYYT

SEQ ID NO: 19367 - protein, 16 aa, Severe acute respiratory syndrome-related coronavirus
  REGION 1..16: note = Table B: HLA-DRB1*01:02L
  source 1..16: note = Severe acute respiratory syndrome coronavirus 2
EFLKRGDKSVYYTSNP

SEQ ID NO: 19368 - protein, 16 aa, Severe acute respiratory syndrome-related coronavirus
  REGION 1..16: note = Table B: HLA-DRB1*01:02L HLA-DPA1*02:01-B1*13:01L
  source 1..16: note = Severe acute respiratory syndrome coronavirus 2
FLKRGDKSVYYTSNPT

SEQ ID NO: 19369 - protein, 12 aa, Severe acute respiratory syndrome-related coronavirus
  REGION 1..12: note = Table B: HLA-DRB1*01:02L HLA-DRB1*15:03L
  source 1..12: note = Severe acute respiratory syndrome coronavirus 2
LSLREVRTIKVF

SEQ ID NO: 19370 - protein, 12 aa, Severe acute respiratory syndrome-related coronavirus
  REGION 1..12: note = Table B: HLA-DRB1*01:02L HLA-DRB1*15:03L
  source 1..12: note = Severe acute respiratory syndrome coronavirus 2
SLREVRTIKVFT

SEQ ID NO: 19371 - protein, 15 aa, Severe acute respiratory syndrome-related coronavirus
  REGION 1..15: note = Table B: HLA-DRB1*01:02L
  source 1..15: note = Severe acute respiratory syndrome coronavirus 2
TQVVDMSMTYGQQFG

SEQ ID NO: 19372 - protein, 14 aa, Severe acute respiratory syndrome-related coronavirus
  REGION 1..14: note = Table B: HLA-DRB1*01:02L
  source 1..14: note = Severe acute respiratory syndrome coronavirus 2
MTYGQQFGPTYLDG

SEQ ID NO: 19373 - protein, 12 aa, Severe acute respiratory syndrome-related coronavirus
  REGION 1..12: note = Table B: HLA-DRB1*01:02L HLA-DRB1*12:01L HLA-DRB1*16:01L HLA-DRB1*04:08L HLA-DRB1*15:03L
  source 1..12: note = Severe acute respiratory syndrome coronavirus 2
IKPHNSHEGKTF

SEQ ID NO: 19374 - protein, 14 aa, Severe acute respiratory syndrome-related coronavirus
  REGION 1..14: note = Table B: HLA-DRB1*01:02L
  source 1..14: note = Severe acute respiratory syndrome coronavirus 2
VLPNDDTLRVEAFE

SEQ ID NO: 19375 - protein, 12 aa, Severe acute respiratory syndrome-related coronavirus
  REGION 1..12: note = Table B: HLA-DRB1*01:02L HLA-DRB1*08:04L HLA-DRB3*02:01L HLA-DRB1*14:01L HLA-DRB1*08:01L HLA-DQA1*05:05-B1*03:01L HLA-DRB1*04:08L
  source 1..12: note = Severe acute respiratory syndrome coronavirus 2
DDTLRVEAFEYY

SEQ ID NO: 19376 - protein, 12 aa, Severe acute respiratory syndrome-related coronavirus
  REGION 1..12: note = Table B: HLA-DRB1*01:02L HLA-DRB1*14:01L HLA-DRB1*11:04L HLA-DRB1*08:01L HLA-DRB1*11:01L HLA-DRB3*01:01L HLA-DPA1*01:03-B1*02:01L
  source 1..12: note = Severe acute respiratory syndrome coronavirus 2
DTLRVEAFEYYH

SEQ ID NO: 19377 - protein, 13 aa, Severe acute respiratory syndrome-related coronavirus
  REGION 1..13: note = Table B: HLA-DRB1*01:02L HLA-DRB1*08:01L HLA-DRB1*12:01L HLA-DPA1*01:03-B1*02:01L
  source 1..13: note = Severe acute respiratory syndrome coronavirus 2
TLRVEAFEYYHTT

SEQ ID NO: 19378 - protein, 12 aa, Severe acute respiratory syndrome-related coronavirus
  REGION 1..12: note = Table B: HLA-DRB1*01:02L HLA-DQA1*01:01-B1*05:01L HLA-DRB1*07:01L
  source 1..12: note = Severe acute respiratory syndrome coronavirus 2
YHTTDPSFLGRY

SEQ ID NO: 19379 - protein, 12 aa, Severe acute respiratory syndrome-related coronavirus
  REGION 1..12: note = Table B: HLA-DRB1*01:02L
  source 1..12: note = Severe acute respiratory syndrome coronavirus 2
HTTDPSFLGRYM

SEQ ID NO: 19380 - protein, 11 aa, Severe acute respiratory syndrome-related coronavirus
  REGION 1..11: note = Table B: HLA-DRB1*01:02L HLA-DRB1*04:08L
  source 1..11: note = Severe acute respiratory syndrome coronavirus 2
RYMSALNHTKK

SEQ ID NO: 19381 - protein, 12 aa, Severe acute respiratory syndrome-related coronavirus
  REGION 1..12: note = Table B: HLA-DRB1*01:02L
  source 1..12: note = Severe acute respiratory syndrome coronavirus 2
YMSALNHTKKWK

SEQ ID NO: 19382 - protein, 12 aa, Severe acute respiratory syndrome-related coronavirus
  REGION 1..12: note = Table B: HLA-DRB1*01:02L HLA-DRB1*14:01L HLA-DRB1*12:01L HLA-DRB3*01:01L HLA-DRB1*16:01L
  source 1..12: note = Severe acute respiratory syndrome coronavirus 2
ALNHTKKWKYPQ

SEQ ID NO: 19383 - protein, 13 aa, Severe acute respiratory syndrome-related coronavirus
  REGION 1..13: note = Table B: HLA-DRB1*01:02L HLA-DRB1*12:01L HLA-DPA1*03:01-B1*105:01L HLA-DPA1*01:02-B1*04:01L HLA-DRB1*04:08L
  source 1..13: note = Severe acute respiratory syndrome coronavirus 2
TKKWKYPQVNGLT

SEQ ID NO: 19384 - protein, 15 aa, Severe acute respiratory syndrome-related coronavirus
  REGION 1..15: note = Table B: HLA-DRB1*01:02L
  source 1..15: note = Severe acute respiratory syndrome coronavirus 2
KKWKYPQVNGLTSIK

SEQ ID NO: 19385 - protein, 13 aa, Severe acute respiratory syndrome-related coronavirus
  REGION 1..13: note = Table B: HLA-DRB1*01:02L HLA-DPA1*02:01-B1*13:01L
  source 1..13: note = Severe acute respiratory syndrome coronavirus 2
LTSIKWADNNCYL

SEQ ID NO: 19386 - protein, 14 aa, Severe acute respiratory syndrome-related coronavirus
  REGION 1..14: note = Table B: HLA-DRB1*01:02L HLA-DPA1*03:01-B1*105:01L HLA-DRB1*15:03L
  source 1..14: note = Severe acute respiratory syndrome coronavirus 2
SIKWADNNCYLATA

SEQ ID NO: 19387 - protein, 15 aa, Severe acute respiratory syndrome-related coronavirus
  REGION 1..15: note = Table B: HLA-DRB1*01:02L HLA-DPA1*01:03-B1*03:01L HLA-DQA1*05:05-B1*03:19L HLA-DPA1*01:03-B1*04:01L HLA-DRB1*12:01L HLA-DPA1*01:03-B1*02:01L HLA-DQA1*05:05-B1*03:01L HLA-DRB1*16:01L HLA-DRB1*04:08L
  REGION 1..15: note = CONT. FROM ABOVE: HLA-DQA1*02:01-B1*03:03L HLA-DRB1*15:03L
  source 1..15: note = Severe acute respiratory syndrome coronavirus 2
DNNCYLATALLTLQQ

SEQ ID NO: 19388 - protein, 14 aa, Severe acute respiratory syndrome-related coronavirus
  REGION 1..14: note = Table B: HLA-DRB1*01:02L HLA-DRB1*12:01L HLA-DPA1*03:01-B1*105:01L HLA-DRB1*15:03L
  source 1..14: note = Severe acute respiratory syndrome coronavirus 2
LLTLQQIELKFNPP

SEQ ID NO: 19389 - protein, 14 aa, Severe acute respiratory syndrome-related coronavirus
  REGION 1..14: note = Table B: HLA-DRB1*01:02L HLA-DPA1*03:01-B1*105:01L HLA-DRB1*15:03L
  source 1..14: note = Severe acute respiratory syndrome coronavirus 2
LTLQQIELKFNPPA

SEQ ID NO: 19390 - protein, 12 aa, Severe acute respiratory syndrome-related coronavirus
  REGION 1..12: note = Table B: HLA-DRB1*01:02L HLA-DRB3*02:01L HLA-DRB1*04:08L
  source 1..12: note = Severe acute respiratory syndrome coronavirus 2
LKFNPPALQDAY

SEQ ID NO: 19391 - protein, 12 aa, Severe acute respiratory syndrome-related coronavirus
  REGION 1..12: note = Table B: HLA-DRB1*01:02L HLA-DPA1*01:03-B1*03:01L
  source 1..12: note = Severe acute respiratory syndrome coronavirus 2
YRARAGEAANFC

SEQ ID NO: 19392 - protein, 12 aa, Severe acute respiratory syndrome-related coronavirus
  REGION 1..12: note = Table B: HLA-DRB1*01:02L HLA-DPA1*03:01-B1*105:01L
  source 1..12: note = Severe acute respiratory syndrome coronavirus 2
LILAYCNKTVGE

SEQ ID NO: 19393 - protein, 12 aa, Severe acute respiratory syndrome-related coronavirus
  REGION 1..12: note = Table B: HLA-DRB1*01:02L HLA-DRB1*14:01L HLA-DQA1*05:01-B1*02:01L HLA-DRB1*12:01L HLA-DRB1*16:01L HLA-DRB1*15:03L
  source 1..12: note = Severe acute respiratory syndrome coronavirus 2
GDVRETMSYLFQ

SEQ ID NO: 19394 - protein, 12 aa, Severe acute respiratory syndrome-related coronavirus
  REGION 1..12: note = Table B: HLA-DRB1*01:02L HLA-DRB1*12:01L HLA-DRB1*15:03L
  source 1..12: note = Severe acute respiratory syndrome coronavirus 2
DVRETMSYLFQH

SEQ ID NO: 19395 - protein, 13 aa, Severe acute respiratory syndrome-related coronavirus
  REGION 1..13: note = Table B: HLA-DRB1*01:02L HLA-DPA1*03:01-B1*04:02L HLA-DRB1*08:01L HLA-DRB1*12:01L HLA-DPA1*02:01-B1*13:01L HLA-DRB1*16:01L HLA-DRB1*15:03L
  source 1..13: note = Severe acute respiratory syndrome coronavirus 2
VRETMSYLFQHAN

SEQ ID NO: 19396 - protein, 13 aa, Severe acute respiratory syndrome-related coronavirus
  REGION 1..13: note = Table B: HLA-DRB1*01:02L HLA-DRB1*12:01L HLA-DPA1*01:03-B1*02:01L HLA-DRB1*15:03L
  source 1..13: note = Severe acute respiratory syndrome coronavirus 2
SYLFQHANLDSCK

SEQ ID NO: 19397 - protein, 14 aa, Severe acute respiratory syndrome-related coronavirus
  REGION 1..14: note = Table B: HLA-DRB1*01:02L
  source 1..14: note = Severe acute respiratory syndrome coronavirus 2
GQQQTTLKGVEAVM

SEQ ID NO: 19398 - protein, 13 aa, Severe acute respiratory syndrome-related coronavirus
  REGION 1..13: note = Table B: HLA-DRB1*01:02L
  source 1..13: note = Severe acute respiratory syndrome coronavirus 2
TTLKGVEAVMYMG

SEQ ID NO: 19399 - protein, 14 aa, Severe acute respiratory syndrome-related coronavirus
  REGION 1..14: note = Table B: HLA-DRB1*01:02L
  source 1..14: note = Severe acute respiratory syndrome coronavirus 2
TLKGVEAVMYMGTL

SEQ ID NO: 19400 - protein, 14 aa, Severe acute respiratory syndrome-related coronavirus
  REGION 1..14: note = Table B: HLA-DRB1*01:02L
  source 1..14: note = Severe acute respiratory syndrome coronavirus 2
FKKGVQIPCTCGKQ

SEQ ID NO: 19401 - protein, 14 aa, Severe acute respiratory syndrome-related coronavirus
  REGION 1..14: note = Table B: HLA-DRB1*01:02L HLA-DQA1*02:01-B1*03:03L
  source 1..14: note = Severe acute respiratory syndrome coronavirus 2
GVQIPCTCGKQATK

SEQ ID NO: 19402 - protein, 14 aa, Severe acute respiratory syndrome-related coronavirus
  REGION 1..14: note = Table B: HLA-DRB1*01:02L
  source 1..14: note = Severe acute respiratory syndrome coronavirus 2
KHGTFTCASEYTGN

SEQ ID NO: 19403 - protein, 14 aa, Severe acute respiratory syndrome-related coronavirus
  REGION 1..14: note = Table B: HLA-DRB1*01:02L HLA-DRB1*04:08L
  source 1..14: note = Severe acute respiratory syndrome coronavirus 2
YKHITSKETLYCID

SEQ ID NO: 19404 - protein, 11 aa, Severe acute respiratory syndrome-related coronavirus
  REGION 1..11: note = Table B: HLA-DRB1*01:02L
  source 1..11: note = Severe acute respiratory syndrome coronavirus 2
LYCIDGALLTK

SEQ ID NO: 19405 - protein, 12 aa, Severe acute respiratory syndrome-related coronavirus
  REGION 1..12: note = Table B: HLA-DRB1*01:02L HLA-DPA1*01:03-B1*03:01L HLA-DPA1*03:01-B1*04:02L HLA-DRB1*08:01L HLA-DRB1*12:01L HLA-DPA1*01:03-B1*104:01L HLA-DPA1*01:02-B1*04:01L HLA-DRB1*16:01L HLA-DRB1*15:03L
  source 1..12: note = Severe acute respiratory syndrome coronavirus 2
IDGALLTKSSEY

SEQ ID NO: 19406 - protein, 14 aa, Severe acute respiratory syndrome-related coronavirus
  REGION 1..14: note = Table B: HLA-DRB1*01:02L HLA-DPA1*03:01-B1*105:01L HLA-DRB1*15:03L
  source 1..14: note = Severe acute respiratory syndrome coronavirus 2
ALLTKSSEYKGPIT

SEQ ID NO: 19407 - protein, 14 aa, Severe acute respiratory syndrome-related coronavirus
  REGION 1..14: note = Table B: HLA-DRB1*01:02L HLA-DPA1*02:01-B1*13:01L
  source 1..14: note = Severe acute respiratory syndrome coronavirus 2
LLTKSSEYKGPITD

SEQ ID NO: 19408 - protein, 14 aa, Severe acute respiratory syndrome-related coronavirus
  REGION 1..14: note = Table B: HLA-DRB1*01:02L
  source 1..14: note = Severe acute respiratory syndrome coronavirus 2
TEIDPKLDNYYKKD

SEQ ID NO: 19409 - protein, 15 aa, Severe acute respiratory syndrome-related coronavirus
  REGION 1..15: note = Table B: HLA-DRB1*01:02L HLA-DQA1*01-B1*05L HLA-DRB1*04:08L
  source 1..15: note = Severe acute respiratory syndrome coronavirus 2
DPKLDNYYKKDNSYF

SEQ ID NO: 19410 - protein, 14 aa, Severe acute respiratory syndrome-related coronavirus
  REGION 1..14: note = Table B: HLA-DRB1*01:02L HLA-DRB1*14:01L HLA-DPA1*03:01-B1*105:01L HLA-DRB1*04:08L
  source 1..14: note = Severe acute respiratory syndrome coronavirus 2
NYYKKDNSYFTEQP

SEQ ID NO: 19411 - protein, 11 aa, Severe acute respiratory syndrome-related coronavirus
  REGION 1..11: note = Table B: HLA-DRB1*01:02L HLA-DRB1*14:02L HLA-DRB1*15:03L
  source 1..11: note = Severe acute respiratory syndrome coronavirus 2
DLVPNQPYPNA

SEQ ID NO: 19412 - protein, 12 aa, Severe acute respiratory syndrome-related coronavirus
  REGION 1..12: note = Table B: HLA-DRB1*01:02L HLA-DRB1*15:03L
  source 1..12: note = Severe acute respiratory syndrome coronavirus 2
DNFKFVCDNIKF

SEQ ID NO: 19413 - protein, 11 aa, Severe acute respiratory syndrome-related coronavirus
  REGION 1..11: note = Table B: HLA-DRB1*01:02L HLA-DRB1*04:08L
  source 1..11: note = Severe acute respiratory syndrome coronavirus 2
GYKKPASRELK

SEQ ID NO: 19414 - protein, 15 aa, Severe acute respiratory syndrome-related coronavirus
  REGION 1..15: note = Table B: HLA-DRB1*01:02L HLA-DPA1*02:01-B1*13:01L
  source 1..15: note = Severe acute respiratory syndrome coronavirus 2
KPASRELKVTFFPDL

SEQ ID NO: 19415 - protein, 14 aa, Severe acute respiratory syndrome-related coronavirus
  REGION 1..14: note = Table B: HLA-DRB1*01:02L
  source 1..14: note = Severe acute respiratory syndrome coronavirus 2
LNGDVVAIDYKHYT

SEQ ID NO: 19416 - protein, 14 aa, Severe acute respiratory syndrome-related coronavirus
  REGION 1..14: note = Table B: HLA-DRB1*01:02L HLA-DRB1*11:04L
  source 1..14: note = Severe acute respiratory syndrome coronavirus 2
PSFKKGAKLLHKPI

SEQ ID NO: 19417 - protein, 14 aa, Severe acute respiratory syndrome-related coronavirus
  REGION 1..14: note = Table B: HLA-DRB1*01:02L HLA-DRB1*08:01L
  source 1..14: note = Severe acute respiratory syndrome coronavirus 2
IRCLWSTKPVETSN

SEQ ID NO: 19418 - protein, 13 aa, Severe acute respiratory syndrome-related coronavirus
  REGION 1..13: note = Table B: HLA-DRB1*01:02L HLA-DQA1*01:01-B1*05:01L HLA-DRB1*04:10L HLA-DRB1*12:01L HLA-DPA1*01:03-B1*104:01L
  source 1..13: note = Severe acute respiratory syndrome coronavirus 2
WSTKPVETSNSFD

SEQ ID NO: 19419 - protein, 14 aa, Severe acute respiratory syndrome-related coronavirus
  REGION 1..14: note = Table B: HLA-DRB1*01:02L
  source 1..14: note = Severe acute respiratory syndrome coronavirus 2
STKPVETSNSFDVL

SEQ ID NO: 19420 - protein, 15 aa, Severe acute respiratory syndrome-related coronavirus
  REGION 1..15: note = Table B: HLA-DRB1*01:02L HLA-DPA1*02:01-B1*13:01L
  source 1..15: note = Severe acute respiratory syndrome coronavirus 2
KPVSEEVVENPTIQK

SEQ ID NO: 19421 - protein, 14 aa, Severe acute respiratory syndrome-related coronavirus
  REGION 1..14: note = Table B: HLA-DRB1*01:02L HLA-DPA1*03:01-B1*105:01L HLA-DQA1*02:01-B1*03:03L HLA-DRB1*15:03L
  source 1..14: note = Severe acute respiratory syndrome coronavirus 2
IQKDVLECNVKTTE

SEQ ID NO: 19422 - protein, 13 aa, Severe acute respiratory syndrome-related coronavirus
  REGION 1..13: note = Table B: HLA-DRB1*01:02L HLA-DRB1*08:04L HLA-DPA1*01:03-B1*03:01L HLA-DRB1*12:02L HLA-DRB1*15:03L
  source 1..13: note = Severe acute respiratory syndrome coronavirus 2
VVGDIILKPANNS

SEQ ID NO: 19423 - protein, 15 aa, Severe acute respiratory syndrome-related coronavirus
  REGION 1..15: note = Table B: HLA-DRB1*01:02L
  source 1..15: note = Severe acute respiratory syndrome coronavirus 2
KPANNSLKITEEVGH

SEQ ID NO: 19424 - protein, 12 aa, Severe acute respiratory syndrome-related coronavirus
  REGION 1..12: note = Table B: HLA-DRB1*01:02L
  source 1..12: note = Severe acute respiratory syndrome coronavirus 2
KITEEVGHTDLM

SEQ ID NO: 19425 - protein, 16 aa, Severe acute respiratory syndrome-related coronavirus
  REGION 1..16: note = Table B: HLA-DRB1*01:02L HLA-DRB1*04:08L
  source 1..16: note = Severe acute respiratory syndrome coronavirus 2
ITEEVGHTDLMAAYVD

SEQ ID NO: 19426 - protein, 12 aa, Severe acute respiratory syndrome-related coronavirus
  REGION 1..12: note = Table B: HLA-DRB1*01:02L
  source 1..12: note = Severe acute respiratory syndrome coronavirus 2
SLTIKKPNELSR

SEQ ID NO: 19427 - protein, 14 aa, Severe acute respiratory syndrome-related coronavirus
  REGION 1..14: note = Table B: HLA-DRB1*01:02L HLA-DRB1*08:01L
  source 1..14: note = Severe acute respiratory syndrome coronavirus 2
IKKPNELSRVLGLK

SEQ ID NO: 19428 - protein, 13 aa, Severe acute respiratory syndrome-related coronavirus
  REGION 1..13: note = Table B: HLA-DRB1*01:02L
  source 1..13: note = Severe acute respiratory syndrome coronavirus 2
KPNELSRVLGLKT

SEQ ID NO: 19429 - protein, 11 aa, Severe acute respiratory syndrome-related coronavirus
  REGION 1..11: note = Table B: HLA-DRB1*01:02L HLA-DQA1*05:05-B1*03:19L HLA-DPA1*01:02-B1*04:01L HLA-DRB1*04:08L
  source 1..11: note = Severe acute respiratory syndrome coronavirus 2
IANYAKPFLNK

SEQ ID NO: 19430 - protein, 14 aa, Severe acute respiratory syndrome-related coronavirus
  REGION 1..14: note = Table B: HLA-DRB1*01:02L
  source 1..14: note = Severe acute respiratory syndrome coronavirus 2
NYAKPFLNKVVSTT

SEQ ID NO: 19431 - protein, 13 aa, Severe acute respiratory syndrome-related coronavirus
  REGION 1..13: note = Table B: HLA-DRB1*01:02L
  source 1..13: note = Severe acute respiratory syndrome coronavirus 2
NIVTRCLNRVCTN

SEQ ID NO: 19432 - protein, 14 aa, Severe acute respiratory syndrome-related coronavirus
  REGION 1..14: note = Table B: HLA-DRB1*01:02L
  source 1..14: note = Severe acute respiratory syndrome coronavirus 2
TLLLQLCTFTRSTN

SEQ ID NO: 19433 - protein, 16 aa, Severe acute respiratory syndrome-related coronavirus
  REGION 1..16: note = Table B: HLA-DRB1*01:02L HLA-DPA1*03:01-B1*04:02L HLA-DPA1*01:03-B1*04:02L HLA-DRB1*12:01L HLA-DRB1*16:01L HLA-DRB1*15:03L
  source 1..16: note = Severe acute respiratory syndrome coronavirus 2
GKFCLEASFNYLKSPN

SEQ ID NO: 19434 - protein, 11 aa, Severe acute respiratory syndrome-related coronavirus
  REGION 1..11: note = Table B: HLA-DRB1*01:02L HLA-DRB3*02:01L HLA-DPA1*01:03-B1*03:01L HLA-DRB1*14:01L HLA-DQA1*01-B1*05L HLA-DRB1*09:01L HLA-DRB1*07:01L
  source 1..11: note = Severe acute respiratory syndrome coronavirus 2
LIYSTAALGVL

SEQ ID NO: 19435 - protein, 13 aa, Severe acute respiratory syndrome-related coronavirus
  REGION 1..13: note = Table B: HLA-DRB1*01:02L HLA-DPA1*01:03-B1*03:01L HLA-DPA1*01:03-B1*04:02L HLA-DRB1*16:01L HLA-DRB1*04:08L
  source 1..13: note = Severe acute respiratory syndrome coronavirus 2
GYREGYLNSTNVT

SEQ ID NO: 19436 - protein, 12 aa, Severe acute respiratory syndrome-related coronavirus
  REGION 1..12: note = Table B: HLA-DRB1*01:02L HLA-DRB3*02:01L HLA-DQA1*03:01-B1*03:02L
  source 1..12: note = Severe acute respiratory syndrome coronavirus 2
YLNSTNVTIATY

SEQ ID NO: 19437 - protein, 14 aa, Severe acute respiratory syndrome-related coronavirus
  REGION 1..14: note = Table B: HLA-DRB1*01:02L HLA-DQA1*01-B1*05L HLA-DRB1*12:01L HLA-DRB1*16:01L
  source 1..14: note = Severe acute respiratory syndrome coronavirus 2
AAIMQLFFSYFAVH

SEQ ID NO: 19438 - protein, 12 aa, Severe acute respiratory syndrome-related coronavirus
  REGION 1..12: note = Table B: HLA-DRB1*01:02L HLA-DRB1*15:03L
  source 1..12: note = Severe acute respiratory syndrome coronavirus 2
VQMAPISAMVRM

SEQ ID NO: 19439 - protein, 15 aa, Severe acute respiratory syndrome-related coronavirus
  REGION 1..15: note = Table B: HLA-DRB1*01:02L HLA-DRB1*16:01L
  source 1..15: note = Severe acute respiratory syndrome coronavirus 2
VRMYIFFASFYYVWK

SEQ ID NO: 19440 - protein, 13 aa, Severe acute respiratory syndrome-related coronavirus
  REGION 1..13: note = Table B: HLA-DRB1*01:02L HLA-DPA1*01:03-B1*03:01L HLA-DRB1*12:01L
  source 1..13: note = Severe acute respiratory syndrome coronavirus 2
SFYYVWKSYVHVV

SEQ ID NO: 19441 - protein, 14 aa, Severe acute respiratory syndrome-related coronavirus
  REGION 1..14: note = Table B: HLA-DRB1*01:02L
  source 1..14: note = Severe acute respiratory syndrome coronavirus 2
WKSYVHVVDGCNSS

SEQ ID NO: 19442 - protein, 13 aa, Severe acute respiratory syndrome-related coronavirus
  REGION 1..13: note = Table B: HLA-DRB1*01:02L HLA-DQA1*05:05-B1*03:19L HLA-DPA1*03:01-B1*105:01L HLA-DQA1*05:05-B1*03:01L HLA-DQA1*01:03-B1*06:01L
  source 1..13: note = Severe acute respiratory syndrome coronavirus 2
VHVVDGCNSSTCM

SEQ ID NO: 19443 - protein, 12 aa, Severe acute respiratory syndrome-related coronavirus
  REGION 1..12: note = Table B: HLA-DRB1*01:02L
  source 1..12: note = Severe acute respiratory syndrome coronavirus 2
RVECTTIVNGVR

SEQ ID NO: 19444 - protein, 12 aa, Severe acute respiratory syndrome-related coronavirus
  REGION 1..12: note = Table B: HLA-DRB1*01:02L HLA-DRB1*04:08L
  source 1..12: note = Severe acute respiratory syndrome coronavirus 2
VECTTIVNGVRR

SEQ ID NO: 19445 - protein, 14 aa, Severe acute respiratory syndrome-related coronavirus
  REGION 1..14: note = Table B: HLA-DRB1*01:02L HLA-DQA1*01:03-B1*06:01L
  source 1..14: note = Severe acute respiratory syndrome coronavirus 2
ANGGKGFCKLHNWN

SEQ ID NO: 19446 - protein, 14 aa, Severe acute respiratory syndrome-related coronavirus
  REGION 1..14: note = Table B: HLA-DRB1*01:02L HLA-DRB1*04:08L
  source 1..14: note = Severe acute respiratory syndrome coronavirus 2
VTVKNGSIHLYFDK

SEQ ID NO: 19447 - protein, 12 aa, Severe acute respiratory syndrome-related coronavirus
  REGION 1..12: note = Table B: HLA-DRB1*01:02L HLA-DRB1*08:01L HLA-DRB1*04:08L
  source 1..12: note = Severe acute respiratory syndrome coronavirus 2
YFDKAGQKTYER

SEQ ID NO: 19448 - protein, 14 aa, Severe acute respiratory syndrome-related coronavirus
  REGION 1..14: note = Table B: HLA-DRB1*01:02L HLA-DRB1*08:01L
  source 1..14: note = Severe acute respiratory syndrome coronavirus 2
DKAGQKTYERHSLS

SEQ ID NO: 19449 - protein, 13 aa, Severe acute respiratory syndrome-related coronavirus
  REGION 1..13: note = Table B: HLA-DRB1*01:02L
  source 1..13: note = Severe acute respiratory syndrome coronavirus 2
GQKTYERHSLSHF

SEQ ID NO: 19450 - protein, 12 aa, Severe acute respiratory syndrome-related coronavirus
  REGION 1..12: note = Table B: HLA-DRB1*01:02L HLA-DRB1*08:01L HLA-DRB1*12:01L HLA-DRB1*15:03L
  source 1..12: note = Severe acute respiratory syndrome coronavirus 2
TYERHSLSHFVN

SEQ ID NO: 19451 - protein, 13 aa, Severe acute respiratory syndrome-related coronavirus
  REGION 1..13: note = Table B: HLA-DRB1*01:02L HLA-DRB1*16:01L HLA-DRB1*15:03L
  source 1..13: note = Severe acute respiratory syndrome coronavirus 2
HSLSHFVNLDNLR

SEQ ID NO: 19452 - protein, 15 aa, Severe acute respiratory syndrome-related coronavirus
  REGION 1..15: note = Table B: HLA-DRB1*01:02L
  source 1..15: note = Severe acute respiratory syndrome coronavirus 2
TKGSLPINVIVFDGK

SEQ ID NO: 19453 - protein, 14 aa, Severe acute respiratory syndrome-related coronavirus
  REGION 1..14: note = Table B: HLA-DRB1*01:02L HLA-DPA1*02:01-B1*13:01L HLA-DQA1*03:01-B1*03:02L HLA-DQA1*02:01-B1*03:03L
  source 1..14: note = Severe acute respiratory syndrome coronavirus 2
DGKSKCEESSAKSA

SEQ ID NO: 19454 - protein, 14 aa, Severe acute respiratory syndrome-related coronavirus
  REGION 1..14: note = Table B: HLA-DRB1*01:02L
  source 1..14: note = Severe acute respiratory syndrome coronavirus 2
EESSAKSASVYYSQ

SEQ ID NO: 19455 - protein, 13 aa, Severe acute respiratory syndrome-related coronavirus
  REGION 1..13: note = Table B: HLA-DRB1*01:02L
  source 1..13: note = Severe acute respiratory syndrome coronavirus 2
SSAKSASVYYSQL

SEQ ID NO: 19456 - protein, 14 aa, Severe acute respiratory syndrome-related coronavirus
  REGION 1..14: note = Table B: HLA-DRB1*01:02L HLA-DPA1*01:03-B1*03:01L HLA-DPA1*01:03-B1*04:02L HLA-DRB1*12:01L HLA-DPA1*01:03-B1*02:01L HLA-DQA1*05:05-B1*03:01L HLA-DRB1*15:03L
  source 1..14: note = Severe acute respiratory syndrome coronavirus 2
YSQLMCQPILLLDQ

SEQ ID NO: 19457 - protein, 13 aa, Severe acute respiratory syndrome-related coronavirus
  REGION 1..13: note = Table B: HLA-DRB1*01:02L HLA-DRB3*02:01L
  source 1..13: note = Severe acute respiratory syndrome coronavirus 2
DSAEVAVKMFDAY

SEQ ID NO: 19458 - protein, 12 aa, Severe acute respiratory syndrome-related coronavirus
  REGION 1..12: note = Table B: HLA-DRB1*01:02L HLA-DPA1*01:03-B1*03:01L
  source 1..12: note = Severe acute respiratory syndrome coronavirus 2
ATAEAELAKNVS

SEQ ID NO: 19459 - protein, 13 aa, Severe acute respiratory syndrome-related coronavirus
  REGION 1..13: note = Table B: HLA-DRB1*01:02L HLA-DPA1*02:01-B1*13:01L HLA-DRB1*07:01L HLA-DRB1*04:08L HLA-DRB1*08:03L
  source 1..13: note = Severe acute respiratory syndrome coronavirus 2
AEAELAKNVSLDN

SEQ ID NO: 19460 - protein, 12 aa, Severe acute respiratory syndrome-related coronavirus
  REGION 1..12: note = Table B: HLA-DRB1*01:02L HLA-DPA1*01:03-B1*03:01L HLA-DQA1*01:01-B1*05:01L HLA-DRB1*12:01L HLA-DRB1*16:01L HLA-DRB1*04:08L
  source 1..12: note = Severe acute respiratory syndrome coronavirus 2
ISAARQGFVDSD

SEQ ID NO: 19461 - protein, 13 aa, Severe acute respiratory syndrome-related coronavirus
  REGION 1..13: note = Table B: HLA-DRB1*01:02L HLA-DPA1*02:01-B1*13:01L
  source 1..13: note = Severe acute respiratory syndrome coronavirus 2
RQGFVDSDVETKD

SEQ ID NO: 19462 - protein, 14 aa, Severe acute respiratory syndrome-related coronavirus
  REGION 1..14: note = Table B: HLA-DRB1*01:02L HLA-DRB1*08:04L HLA-DRB1*04:08L
  source 1..14: note = Severe acute respiratory syndrome coronavirus 2
QGFVDSDVETKDVV

SEQ ID NO: 19463 - protein, 14 aa, Severe acute respiratory syndrome-related coronavirus
  REGION 1..14: note = Table B: HLA-DRB1*01:02L HLA-DRB1*08:01L HLA-DPA1*03:01-B1*105:01L HLA-DQA1*02:01-B1*03:03L HLA-DRB1*15:03L
  source 1..14: note = Severe acute respiratory syndrome coronavirus 2
VVECLKLSHQSDIE

SEQ ID NO: 19464 - protein, 14 aa, Severe acute respiratory syndrome-related coronavirus
  REGION 1..14: note = Table B: HLA-DRB1*01:02L HLA-DPA1*01:03-B1*03:01L HLA-DRB1*12:01L HLA-DRB1*04:08L HLA-DRB1*15:03L
  source 1..14: note = Severe acute respiratory syndrome coronavirus 2
KLSHQSDIEVTGDS

SEQ ID NO: 19465 - protein, 14 aa, Severe acute respiratory syndrome-related coronavirus
  REGION 1..14: note = Table B: HLA-DRB1*01:02L HLA-DPA1*02:01-B1*13:01L
  source 1..14: note = Severe acute respiratory syndrome coronavirus 2
SDIEVTGDSCNNYM

SEQ ID NO: 19466 - protein, 14 aa, Severe acute respiratory syndrome-related coronavirus
  REGION 1..14: note = Table B: HLA-DRB1*01:02L
  source 1..14: note = Severe acute respiratory syndrome coronavirus 2
DLGACIDCSARHIN

SEQ ID NO: 19467 - protein, 12 aa, Severe acute respiratory syndrome-related coronavirus
  REGION 1..12: note = Table B: HLA-DRB1*01:02L
  source 1..12: note = Severe acute respiratory syndrome coronavirus 2
ARHINAQVAKSH

SEQ ID NO: 19468 - protein, 13 aa, Severe acute respiratory syndrome-related coronavirus
  REGION 1..13: note = Table B: HLA-DRB1*01:02L HLA-DRB1*08:04L
  source 1..13: note = Severe acute respiratory syndrome coronavirus 2
NIALIWNVKDFMS

SEQ ID NO: 19469 - protein, 13 aa, Severe acute respiratory syndrome-related coronavirus
  REGION 1..13: note = Table B: HLA-DRB1*01:02L HLA-DRB1*08:04L
  source 1..13: note = Severe acute respiratory syndrome coronavirus 2
IALIWNVKDFMSL

SEQ ID NO: 19470 - protein, 12 aa, Severe acute respiratory syndrome-related coronavirus
  REGION 1..12: note = Table B: HLA-DRB1*01:02L HLA-DRB1*08:01L HLA-DPA1*01:03-B1*02:01L
  source 1..12: note = Severe acute respiratory syndrome coronavirus 2
IWNVKDFMSLSE

SEQ ID NO: 19471 - protein, 11 aa, Severe acute respiratory syndrome-related coronavirus
  REGION 1..11: note = Table B: HLA-DRB1*01:02L HLA-DRB1*16:01L HLA-DRB1*15:03L
  source 1..11: note = Severe acute respiratory syndrome coronavirus 2
FMSLSEQLRKQ

SEQ ID NO: 19472 - protein, 12 aa, Severe acute respiratory syndrome-related coronavirus
  REGION 1..12: note = Table B: HLA-DRB1*01:02L HLA-DRB1*11:04L HLA-DRB1*08:01L HLA-DRB1*11:01L HLA-DRB1*16:01L
  source 1..12: note = Severe acute respiratory syndrome coronavirus 2
QLRKQIRSAAKK

SEQ ID NO: 19473 - protein, 12 aa, Severe acute respiratory syndrome-related coronavirus
  REGION 1..12: note = Table B: HLA-DRB1*01:02L
  source 1..12: note = Severe acute respiratory syndrome coronavirus 2
LRKQIRSAAKKN

SEQ ID NO: 19474 - protein, 14 aa, Severe acute respiratory syndrome-related coronavirus
  REGION 1..14: note = Table B: HLA-DRB1*01:02L
  source 1..14: note = Severe acute respiratory syndrome coronavirus 2
KNNLPFKLTCATTR

SEQ ID NO: 19475 - protein, 12 aa, Severe acute respiratory syndrome-related coronavirus
  REGION 1..12: note = Table B: HLA-DRB1*01:02L HLA-DRB1*04:08L
  source 1..12: note = Severe acute respiratory syndrome coronavirus 2
KLTCATTRQVVN

SEQ ID NO: 19476 - protein, 12 aa, Severe acute respiratory syndrome-related coronavirus
  REGION 1..12: note = Table B: HLA-DRB1*01:02L HLA-DRB1*04:08L
  source 1..12: note = Severe acute respiratory syndrome coronavirus 2
HTDFSSEIIGYK

SEQ ID NO: 19477 - protein, 14 aa, Severe acute respiratory syndrome-related coronavirus
  REGION 1..14: note = Table B: HLA-DRB1*01:02L HLA-DRB1*08:04L HLA-DRB1*14:02L HLA-DPA1*01:03-B1*104:01L HLA-DRB1*15:03L
  source 1..14: note = Severe acute respiratory syndrome coronavirus 2
IDGGVTRDIASTDT

SEQ ID NO: 19478 - protein, 14 aa, Severe acute respiratory syndrome-related coronavirus
  REGION 1..14: note = Table B: HLA-DRB1*01:02L HLA-DQA1*05:05-B1*03:01L
  source 1..14: note = Severe acute respiratory syndrome coronavirus 2
IASTDTCFANKHAD

SEQ ID NO: 19479 - protein, 15 aa, Severe acute respiratory syndrome-related coronavirus
  REGION 1..15: note = Table B: HLA-DRB1*01:02L HLA-DPA1*02:01-B1*13:01L HLA-DRB1*16:01L HLA-DRB1*15:03L
  source 1..15: note = Severe acute respiratory syndrome coronavirus 2
ANKHADFDTWFSQRG

SEQ ID NO: 19480 - protein, 14 aa, Severe acute respiratory syndrome-related coronavirus
  REGION 1..14: note = Table B: HLA-DRB1*01:02L
  source 1..14: note = Severe acute respiratory syndrome coronavirus 2
KHADFDTWFSQRGG

SEQ ID NO: 19481 - protein, 14 aa, Severe acute respiratory syndrome-related coronavirus
  REGION 1..14: note = Table B: HLA-DRB1*01:02L HLA-DRB1*04:08L
  source 1..14: note = Severe acute respiratory syndrome coronavirus 2
TWFSQRGGSYTNDK

SEQ ID NO: 19482 - protein, 14 aa, Severe acute respiratory syndrome-related coronavirus
  REGION 1..14: note = Table B: HLA-DRB1*01:02L HLA-DQA1*05:05-B1*03:19L
  source 1..14: note = Severe acute respiratory syndrome coronavirus 2
WFSQRGGSYTNDKA

SEQ ID NO: 19483 - protein, 14 aa, Severe acute respiratory syndrome-related coronavirus
  REGION 1..14: note = Table B: HLA-DRB1*01:02L
  source 1..14: note = Severe acute respiratory syndrome coronavirus 2
DKACPLIAAVITRE

SEQ ID NO: 19484 - protein, 13 aa, Severe acute respiratory syndrome-related coronavirus
  REGION 1..13: note = Table B: HLA-DRB1*01:02L
  source 1..13: note = Severe acute respiratory syndrome coronavirus 2
PGTILRTTNGDFL

SEQ ID NO: 19485 - protein, 14 aa, Severe acute respiratory syndrome-related coronavirus
  REGION 1..14: note = Table B: HLA-DRB1*01:02L
  source 1..14: note = Severe acute respiratory syndrome coronavirus 2
LRTTNGDFLHFLPR

SEQ ID NO: 19486 - protein, 14 aa, Severe acute respiratory syndrome-related coronavirus
  REGION 1..14: note = Table B: HLA-DRB1*01:02L HLA-DRB1*16:01L HLA-DRB1*15:03L
  source 1..14: note = Severe acute respiratory syndrome coronavirus 2
PRVFSAVGNICYTP

SEQ ID NO: 19487 - protein, 14 aa, Severe acute respiratory syndrome-related coronavirus
  REGION 1..14: note = Table B: HLA-DRB1*01:02L HLA-DRB1*04:08L HLA-DRB1*15:03L
  source 1..14: note = Severe acute respiratory syndrome coronavirus 2
RVFSAVGNICYTPS

SEQ ID NO: 19488 - protein, 12 aa, Severe acute respiratory syndrome-related coronavirus
  REGION 1..12: note = Table B: HLA-DRB1*01:02L
  source 1..12: note = Severe acute respiratory syndrome coronavirus 2
NICYTPSKLIEY

SEQ ID NO: 19489 - protein, 14 aa, Severe acute respiratory syndrome-related coronavirus
  REGION 1..14: note = Table B: HLA-DRB1*01:02L HLA-DPA1*01:03-B1*03:01L HLA-DQA1*05:01-B1*02:01L HLA-DPA1*01:03-B1*04:02L HLA-DQA1*03:01-B1*03:02L HLA-DRB1*04:08L HLA-DRB1*15:03L
  source 1..14: note = Severe acute respiratory syndrome coronavirus 2
YTDFATSACVLAAE

SEQ ID NO: 19490 - protein, 14 aa, Severe acute respiratory syndrome-related coronavirus
  REGION 1..14: note = Table B: HLA-DRB1*01:02L HLA-DRB1*16:01L HLA-DRB1*04:08L HLA-DRB1*15:03L
  source 1..14: note = Severe acute respiratory syndrome coronavirus 2
AAECTIFKDASGKP

SEQ ID NO: 19491 - protein, 13 aa, Severe acute respiratory syndrome-related coronavirus
  REGION 1..13: note = Table B: HLA-DRB1*01:02L HLA-DPA1*01:03-B1*03:01L HLA-DPA1*03:01-B1*04:02L
  source 1..13: note = Severe acute respiratory syndrome coronavirus 2
LEGSVAYESLRPD

SEQ ID NO: 19492 - protein, 12 aa, Severe acute respiratory syndrome-related coronavirus
  REGION 1..12: note = Table B: HLA-DRB1*01:02L
  source 1..12: note = Severe acute respiratory syndrome coronavirus 2
AYESLRPDTRYV

SEQ ID NO: 19493 - protein, 13 aa, Severe acute respiratory syndrome-related coronavirus
  REGION 1..13: note = Table B: HLA-DRB1*01:02L HLA-DPA1*02:01-B1*13:01L
  source 1..13: note = Severe acute respiratory syndrome coronavirus 2
IQFPNTYLEGSVR

SEQ ID NO: 19494 - protein, 12 aa, Severe acute respiratory syndrome-related coronavirus
  REGION 1..12: note = Table B: HLA-DRB1*01:02L
  source 1..12: note = Severe acute respiratory syndrome coronavirus 2
RVVTTFDSEYCR

SEQ ID NO: 19495 - protein, 14 aa, Severe acute respiratory syndrome-related coronavirus
  REGION 1..14: note = Table B: HLA-DRB1*01:02L HLA-DRB1*04:08L
  source 1..14: note = Severe acute respiratory syndrome coronavirus 2
DSEYCRHGTCERSE

SEQ ID NO: 19496 - protein, 15 aa, Severe acute respiratory syndrome-related coronavirus
  REGION 1..15: note = Table B: HLA-DRB1*01:02L HLA-DQA1*02:01-B1*03:03L
  source 1..15: note = Severe acute respiratory syndrome coronavirus 2
SEYCRHGTCERSEAG

SEQ ID NO: 19497 - protein, 12 aa, Severe acute respiratory syndrome-related coronavirus
  REGION 1..12: note = Table B: HLA-DRB1*01:02L HLA-DRB1*14:01L
  source 1..12: note = Severe acute respiratory syndrome coronavirus 2
GRWVLNNDYYRS

SEQ ID NO: 19498 - protein, 10 aa, Severe acute respiratory syndrome-related coronavirus
  REGION 1..10: note = Table B: HLA-DRB1*01:02L HLA-DRB1*16:01L
  source 1..10: note = Severe acute respiratory syndrome coronavirus 2
YRSLPGVFCG

SEQ ID NO: 19499 - protein, 14 aa, Severe acute respiratory syndrome-related coronavirus
  REGION 1..14: note = Table B: HLA-DRB1*01:02L HLA-DRB1*08:04L HLA-DRB1*11:01L HLA-DRB1*04:08L
  source 1..14: note = Severe acute respiratory syndrome coronavirus 2
YYFMRFRRAFGEYS

SEQ ID NO: 19500 - protein, 12 aa, Severe acute respiratory syndrome-related coronavirus
  REGION 1..12: note = Table B: HLA-DRB1*01:02L HLA-DRB1*08:01L HLA-DRB1*16:01L HLA-DRB1*04:08L
  source 1..12: note = Severe acute respiratory syndrome coronavirus 2
MRFRRAFGEYSH

SEQ ID NO: 19501 - protein, 12 aa, Severe acute respiratory syndrome-related coronavirus
  REGION 1..12: note = Table B: HLA-DRB1*01:02L
  source 1..12: note = Severe acute respiratory syndrome coronavirus 2
RFRRAFGEYSHV

SEQ ID NO: 19502 - protein, 11 aa, Severe acute respiratory syndrome-related coronavirus
  REGION 1..11: note = Table B: HLA-DRB1*01:02L HLA-DRB1*16:01L
  source 1..11: note = Severe acute respiratory syndrome coronavirus 2
SHVVAFNTLLF

SEQ ID NO: 19503 - protein, 14 aa, Severe acute respiratory syndrome-related coronavirus
  REGION 1..14: note = Table B: HLA-DRB1*01:02L HLA-DPA1*01:03-B1*04:02L HLA-DRB1*16:01L HLA-DRB1*04:08L
  source 1..14: note = Severe acute respiratory syndrome coronavirus 2
HIQWMVMFTPLVPF

SEQ ID NO: 19504 - protein, 10 aa, Severe acute respiratory syndrome-related coronavirus
  REGION 1..10: note = Table B: HLA-DRB1*01:02L HLA-DRB1*15:03L
  source 1..10: note = Severe acute respiratory syndrome coronavirus 2
FTPLVPFWIT

SEQ ID NO: 19505 - protein, 12 aa, Severe acute respiratory syndrome-related coronavirus
  REGION 1..12: note = Table B: HLA-DRB1*01:02L
  source 1..12: note = Severe acute respiratory syndrome coronavirus 2
TIAYIICISTKH

SEQ ID NO: 19506 - protein, 12 aa, Severe acute respiratory syndrome-related coronavirus
  REGION 1..12: note = Table B: HLA-DRB1*01:02L HLA-DPA1*03:01-B1*04:02L
  source 1..12: note = Severe acute respiratory syndrome coronavirus 2
AYIICISTKHFY

SEQ ID NO: 19507 - protein, 11 aa, Severe acute respiratory syndrome-related coronavirus
  REGION 1..11: note = Table B: HLA-DRB1*01:02L HLA-DRB1*04:08L
  source 1..11: note = Severe acute respiratory syndrome coronavirus 2
FYWFFSNYLKR

SEQ ID NO: 19508 - protein, 14 aa, Severe acute respiratory syndrome-related coronavirus
  REGION 1..14: note = Table B: HLA-DRB1*01:02L HLA-DRB1*12:01L HLA-DPA1*02:01-B1*13:01L
  source 1..14: note = Severe acute respiratory syndrome coronavirus 2
YLKRRVVFNGVSFS

SEQ ID NO: 19509 - protein, 14 aa, Severe acute respiratory syndrome-related coronavirus
  REGION 1..14: note = Table B: HLA-DRB1*01:02L HLA-DPA1*01:03-B1*03:01L HLA-DPA1*03:01-B1*04:02L HLA-DRB1*15:03L
  source 1..14: note = Severe acute respiratory syndrome coronavirus 2
FEEAALCTFLLNKE

SEQ ID NO: 19510 - protein, 14 aa, Severe acute respiratory syndrome-related coronavirus
  REGION 1..14: note = Table B: HLA-DRB1*01:02L
  source 1..14: note = Severe acute respiratory syndrome coronavirus 2
KEMYLKLRSDVLLP

SEQ ID NO: 19511 - protein, 14 aa, Severe acute respiratory syndrome-related coronavirus
  REGION 1..14: note = Table B: HLA-DRB1*01:02L
  source 1..14: note = Severe acute respiratory syndrome coronavirus 2
EMYLKLRSDVLLPL

SEQ ID NO: 19512 - protein, 12 aa, Severe acute respiratory syndrome-related coronavirus
  REGION 1..12: note = Table B: HLA-DRB1*01:02L
  source 1..12: note = Severe acute respiratory syndrome coronavirus 2
LLPLTQYNRYLA

SEQ ID NO: 19513 - protein, 12 aa, Severe acute respiratory syndrome-related coronavirus
  REGION 1..12: note = Table B: HLA-DRB1*01:02L HLA-DRB1*04:08L
  source 1..12: note = Severe acute respiratory syndrome coronavirus 2
TQYNRYLALYNK

SEQ ID NO: 19514 - protein, 12 aa, Severe acute respiratory syndrome-related coronavirus
  REGION 1..12: note = Table B: HLA-DRB1*01:02L HLA-DPA1*03:01-B1*04:02L HLA-DPA1*03:01-B1*105:01L HLA-DPA1*01:02-B1*04:01L HLA-DRB1*15:03L
  source 1..12: note = Severe acute respiratory syndrome coronavirus 2
QYNRYLALYNKY

SEQ ID NO: 19515 - protein, 11 aa, Severe acute respiratory syndrome-related coronavirus
  REGION 1..11: note = Table B: HLA-DRB1*01:02L HLA-DRB1*08:01L HLA-DRB1*12:01L HLA-DRB1*04:08L
  source 1..11: note = Severe acute respiratory syndrome coronavirus 2
NRYLALYNKYK

SEQ ID NO: 19516 - protein, 11 aa, Severe acute respiratory syndrome-related coronavirus
  REGION 1..11: note = Table B: HLA-DRB1*01:02L
  source 1..11: note = Severe acute respiratory syndrome coronavirus 2
YLALYNKYKYF

SEQ ID NO: 19517 - protein, 15 aa, Severe acute respiratory syndrome-related coronavirus
  REGION 1..15: note = Table B: HLA-DRB1*01:02L
  source 1..15: note = Severe acute respiratory syndrome coronavirus 2
YREAACCHLAKALND

SEQ ID NO: 19518 - protein, 16 aa, Severe acute respiratory syndrome-related coronavirus
  REGION 1..16: note = Table B: HLA-DRB1*01:02L
  source 1..16: note = Severe acute respiratory syndrome coronavirus 2
LNDFSNSGSDVLYQPP

SEQ ID NO: 19519 - protein, 15 aa, Severe acute respiratory syndrome-related coronavirus
  REGION 1..15: note = Table B: HLA-DRB1*01:02L HLA-DRB1*08:04L HLA-DRB1*11:04L HLA-DRB1*08:01L HLA-DRB1*11:01L HLA-DRB3*01:01L
  source 1..15: note = Severe acute respiratory syndrome coronavirus 2
SAVLQSGFRKMAFPS

SEQ ID NO: 19520 - protein, 15 aa, Severe acute respiratory syndrome-related coronavirus
  REGION 1..15: note = Table B: HLA-DRB1*01:02L
  source 1..15: note = Severe acute respiratory syndrome coronavirus 2
AVLQSGFRKMAFPSG

SEQ ID NO: 19521 - protein, 12 aa, Severe acute respiratory syndrome-related coronavirus
  REGION 1..12: note = Table B: HLA-DRB1*01:02L HLA-DRB1*12:01L HLA-DRB1*15:03L
  source 1..12: note = Severe acute respiratory syndrome coronavirus 2
LIRKSNHNFLVQ

SEQ ID NO: 19522 - protein, 13 aa, Severe acute respiratory syndrome-related coronavirus
  REGION 1..13: note = Table B: HLA-DRB1*01:02L HLA-DRB1*12:01L HLA-DRB1*15:03L
  source 1..13: note = Severe acute respiratory syndrome coronavirus 2
AGNVQLRVIGHSM

SEQ ID NO: 19523 - protein, 17 aa, Severe acute respiratory syndrome-related coronavirus
  REGION 1..17: note = Table B: HLA-DRB1*01:02L
  source 1..17: note = Severe acute respiratory syndrome coronavirus 2
IQPGQTFSVLACYNGSP

SEQ ID NO: 19524 - protein, 14 aa, Severe acute respiratory syndrome-related coronavirus
  REGION 1..14: note = Table B: HLA-DRB1*01:02L HLA-DRB1*15:03L
  source 1..14: note = Severe acute respiratory syndrome coronavirus 2
SVLACYNGSPSGVY

SEQ ID NO: 19525 - protein, 14 aa, Severe acute respiratory syndrome-related coronavirus
  REGION 1..14: note = Table B: HLA-DRB1*01:02L HLA-DPA1*01:03-B1*03:01L HLA-DRB1*15:03L
  source 1..14: note = Severe acute respiratory syndrome coronavirus 2
VLACYNGSPSGVYQ

SEQ ID NO: 19526 - protein, 13 aa, Severe acute respiratory syndrome-related coronavirus
  REGION 1..13: note = Table B: HLA-DRB1*01:02L HLA-DRB1*08:01L HLA-DRB1*11:01L HLA-DRB1*12:01L HLA-DQA1*01:03-B1*06:01L HLA-DQA1*02:01-B1*03:03L HLA-DRB1*15:03L
  source 1..13: note = Severe acute respiratory syndrome coronavirus 2
IDYDCVSFCYMHH

SEQ ID NO: 19527 - protein, 13 aa, Severe acute respiratory syndrome-related coronavirus
  REGION 1..13: note = Table B: HLA-DRB1*01:02L HLA-DRB1*14:01L HLA-DRB1*04:08L
  source 1..13: note = Severe acute respiratory syndrome coronavirus 2
GVHAGTDLEGNFY

SEQ ID NO: 19528 - protein, 13 aa, Severe acute respiratory syndrome-related coronavirus
  REGION 1..13: note = Table B: HLA-DRB1*01:02L HLA-DPA1*03:01-B1*04:02L HLA-DQA1*01:01-B1*05:01L
  source 1..13: note = Severe acute respiratory syndrome coronavirus 2
EGNFYGPFVDRQT

SEQ ID NO: 19529 - protein, 12 aa, Severe acute respiratory syndrome-related coronavirus
  REGION 1..12: note = Table B: HLA-DRB1*01:02L HLA-DRB1*04:10L HLA-DRB1*04:08L HLA-DRB1*15:03L
  source 1..12: note = Severe acute respiratory syndrome coronavirus 2
YGPFVDRQTAQA

SEQ ID NO: 19530 - protein, 13 aa, Severe acute respiratory syndrome-related coronavirus
  REGION 1..13: note = Table B: HLA-DRB1*01:02L
  source 1..13: note = Severe acute respiratory syndrome coronavirus 2
NVLAWLYAAVING

SEQ ID NO: 19531 - protein, 12 aa, Severe acute respiratory syndrome-related coronavirus
  REGION 1..12: note = Table B: HLA-DRB1*01:02L HLA-DPA1*01:03-B1*03:01L HLA-DRB1*08:01L HLA-DRB1*04:10L HLA-DRB1*12:01L HLA-DRB1*10:01L HLA-DRB1*15:03L
  source 1..12: note = Severe acute respiratory syndrome coronavirus 2
AWLYAAVINGDR

SEQ ID NO: 19532 - protein, 11 aa, Severe acute respiratory syndrome-related coronavirus
  REGION 1..11: note = Table B: HLA-DRB1*01:02L
  source 1..11: note = Severe acute respiratory syndrome coronavirus 2
LYAAVINGDRW

SEQ ID NO: 19533 - protein, 13 aa, Severe acute respiratory syndrome-related coronavirus
  REGION 1..13: note = Table B: HLA-DRB1*01:02L HLA-DRB1*08:04L HLA-DRB1*11:01L HLA-DPA1*01:03-B1*02:01L
  source 1..13: note = Severe acute respiratory syndrome coronavirus 2
DRWFLNRFTTTLN

SEQ ID NO: 19534 - protein, 14 aa, Severe acute respiratory syndrome-related coronavirus
  REGION 1..14: note = Table B: HLA-DRB1*01:02L HLA-DPA1*02:01-B1*13:01L
  source 1..14: note = Severe acute respiratory syndrome coronavirus 2
FNLVAMKYNYEPLT

SEQ ID NO: 19535 - protein, 13 aa, Severe acute respiratory syndrome-related coronavirus
  REGION 1..13: note = Table B: HLA-DRB1*01:02L
  source 1..13: note = Severe acute respiratory syndrome coronavirus 2
PLSAQTGIAVLDM

SEQ ID NO: 19536 - protein, 13 aa, Severe acute respiratory syndrome-related coronavirus
  REGION 1..13: note = Table B: HLA-DRB1*01:02L HLA-DRB1*12:01L HLA-DQA1*05:05-B1*03:01L HLA-DRB1*04:08L HLA-DQA1*02:01-B1*03:03L
  source 1..13: note = Severe acute respiratory syndrome coronavirus 2
TGIAVLDMCASLK

SEQ ID NO: 19537 - protein, 15 aa, Severe acute respiratory syndrome-related coronavirus
  REGION 1..15: note = Table B: HLA-DRB1*01:02L
  source 1..15: note = Severe acute respiratory syndrome coronavirus 2
KELLQNGMNGRTILG

SEQ ID NO: 19538 - protein, 14 aa, Severe acute respiratory syndrome-related coronavirus
  REGION 1..14: note = Table B: HLA-DRB1*01:02L HLA-DRB1*08:04L
  source 1..14: note = Severe acute respiratory syndrome coronavirus 2
ALLEDEFTPFDVVR

SEQ ID NO: 19539 - protein, 12 aa, Severe acute respiratory syndrome-related coronavirus
  REGION 1..12: note = Table B: HLA-DRB1*01:02L HLA-DRB1*14:17L HLA-DRB1*15:03L
  source 1..12: note = Severe acute respiratory syndrome coronavirus 2
SGVTFQSAVKRT

SEQ ID NO: 19540 - protein, 12 aa, Severe acute respiratory syndrome-related coronavirus
  REGION 1..12: note = Table B: HLA-DRB1*01:02L HLA-DRB1*14:01L HLA-DRB1*08:01L HLA-DRB1*16:01L HLA-DRB1*04:08L
  source 1..12: note = Severe acute respiratory syndrome coronavirus 2
SAVKRTIKGTHH

SEQ ID NO: 19541 - protein, 12 aa, Severe acute respiratory syndrome-related coronavirus
  REGION 1..12: note = Table B: HLA-DRB1*01:02L HLA-DRB1*16:01L
  source 1..12: note = Severe acute respiratory syndrome coronavirus 2
AVKRTIKGTHHW

SEQ ID NO: 19542 - protein, 14 aa, Severe acute respiratory syndrome-related coronavirus
  REGION 1..14: note = Table B: HLA-DRB1*01:02L
  source 1..14: note = Severe acute respiratory syndrome coronavirus 2
KRTIKGTHHWLLLT

SEQ ID NO: 19543 - protein, 14 aa, Severe acute respiratory syndrome-related coronavirus
  REGION 1..14: note = Table B: HLA-DRB1*01:02L HLA-DPA1*01:03-B1*03:01L HLA-DPA1*01:03-B1*04:02L HLA-DPA1*01:03-B1*104:01L
  source 1..14: note = Severe acute respiratory syndrome coronavirus 2
LPFAMGIIAMSAFA

SEQ ID NO: 19544 - protein, 11 aa, Severe acute respiratory syndrome-related coronavirus
  REGION 1..11: note = Table B: HLA-DRB1*01:02L HLA-DRB1*08:01L HLA-DRB1*04:08L
  source 1..11: note = Severe acute respiratory syndrome coronavirus 2
FAMMFVKHKHA

SEQ ID NO: 19545 - protein, 12 aa, Severe acute respiratory syndrome-related coronavirus
  REGION 1..12: note = Table B: HLA-DRB1*01:02L
  source 1..12: note = Severe acute respiratory syndrome coronavirus 2
LFLLPSLATVAY

SEQ ID NO: 19546 - protein, 17 aa, Severe acute respiratory syndrome-related coronavirus
  REGION 1..17: note = Table B: HLA-DRB1*01:02L
  source 1..17: note = Severe acute respiratory syndrome coronavirus 2
LPSLATVAYFNMVYMPA

SEQ ID NO: 19547 - protein, 14 aa, Severe acute respiratory syndrome-related coronavirus
  REGION 1..14: note = Table B: HLA-DRB1*01:02L HLA-DRB1*08:04L HLA-DPA1*01:03-B1*03:01L HLA-DRB1*12:01L HLA-DPA1*02:01-B1*13:01L HLA-DQA1*05:05-B1*03:01L HLA-DRB1*16:01L HLA-DRB1*04:08L
  source 1..14: note = Severe acute respiratory syndrome coronavirus 2
VAYFNMVYMPASWV

SEQ ID NO: 19548 - protein, 13 aa, Severe acute respiratory syndrome-related coronavirus
  REGION 1..13: note = Table B: HLA-DRB1*01:02L
  source 1..13: note = Severe acute respiratory syndrome coronavirus 2
DMVDTSLSGFKLK

SEQ ID NO: 19549 - protein, 14 aa, Severe acute respiratory syndrome-related coronavirus
  REGION 1..14: note = Table B: HLA-DRB1*01:02L HLA-DRB1*15:03L
  source 1..14: note = Severe acute respiratory syndrome coronavirus 2
SGFKLKDCVMYASA

SEQ ID NO: 19550 - protein, 13 aa, Severe acute respiratory syndrome-related coronavirus
  REGION 1..13: note = Table B: HLA-DRB1*01:02L HLA-DRB1*14:01L
  source 1..13: note = Severe acute respiratory syndrome coronavirus 2
VVLLILMTARTVY

SEQ ID NO: 19551 - protein, 13 aa, Severe acute respiratory syndrome-related coronavirus
  REGION 1..13: note = Table B: HLA-DRB1*01:02L
  source 1..13: note = Severe acute respiratory syndrome coronavirus 2
LMTARTVYDDGAR

SEQ ID NO: 19552 - protein, 13 aa, Severe acute respiratory syndrome-related coronavirus
  REGION 1..13: note = Table B: HLA-DRB1*01:02L HLA-DPA1*01:03-B1*03:01L HLA-DRB1*16:01L
  source 1..13: note = Severe acute respiratory syndrome coronavirus 2
ARRVWTLMNVLTL

SEQ ID NO: 19553 - protein, 12 aa, Severe acute respiratory syndrome-related coronavirus
  REGION 1..12: note = Table B: HLA-DRB1*01:02L
  source 1..12: note = Severe acute respiratory syndrome coronavirus 2
WTLMNVLTLVYK

SEQ ID NO: 19554 - protein, 13 aa, Severe acute respiratory syndrome-related coronavirus
  REGION 1..13: note = Table B: HLA-DRB1*01:02L HLA-DRB1*04:08L
  source 1..13: note = Severe acute respiratory syndrome coronavirus 2
NVLTLVYKVYYGN

SEQ ID NO: 19555 - protein, 13 aa, Severe acute respiratory syndrome-related coronavirus
  REGION 1..13: note = Table B: HLA-DRB1*01:02L HLA-DRB1*08:04L HLA-DPA1*01:03-B1*03:01L HLA-DRB1*08:01L HLA-DQA1*05:01-B1*02:01L HLA-DPA1*01:03-B1*04:02L HLA-DRB1*16:01L
  source 1..13: note = Severe acute respiratory syndrome coronavirus 2
VVTTVMFLARGIV

SEQ ID NO: 19556 - protein, 10 aa, Severe acute respiratory syndrome-related coronavirus
  REGION 1..10: note = Table B: HLA-DRB1*01:02L HLA-DRB1*12:01L HLA-DRB1*15:03L
  source 1..10: note = Severe acute respiratory syndrome coronavirus 2
IFFITGNTLQ

SEQ ID NO: 19557 - protein, 14 aa, Severe acute respiratory syndrome-related coronavirus
  REGION 1..14: note = Table B: HLA-DRB1*01:02L
  source 1..14: note = Severe acute respiratory syndrome coronavirus 2
FGLFCLLNRYFRLT

SEQ ID NO: 19558 - protein, 13 aa, Severe acute respiratory syndrome-related coronavirus
  REGION 1..13: note = Table B: HLA-DRB1*01:02L HLA-DRB1*04:08L
  source 1..13: note = Severe acute respiratory syndrome coronavirus 2
NRYFRLTLGVYDY

SEQ ID NO: 19559 - protein, 13 aa, Severe acute respiratory syndrome-related coronavirus
  REGION 1..13: note = Table B: HLA-DRB1*01:02L
  source 1..13: note = Severe acute respiratory syndrome coronavirus 2
LGVYDYLVSTQEF

SEQ ID NO: 19560 - protein, 12 aa, Severe acute respiratory syndrome-related coronavirus
  REGION 1..12: note = Table B: HLA-DRB1*01:02L HLA-DRB3*02:01L
  source 1..12: note = Severe acute respiratory syndrome coronavirus 2
YDYLVSTQEFRY

SEQ ID NO: 19561 - protein, 11 aa, Severe acute respiratory syndrome-related coronavirus
  REGION 1..11: note = Table B: HLA-DRB1*01:02L HLA-DRB3*02:01L
  source 1..11: note = Severe acute respiratory syndrome coronavirus 2
YLVSTQEFRYM

SEQ ID NO: 19562 - protein, 12 aa, Severe acute respiratory syndrome-related coronavirus
  REGION 1..12: note = Table B: HLA-DRB1*01:02L
  source 1..12: note = Severe acute respiratory syndrome coronavirus 2
QEFRYMNSQGLL

SEQ ID NO: 19563 - protein, 12 aa, Severe acute respiratory syndrome-related coronavirus
  REGION 1..12: note = Table B: HLA-DRB1*01:02L
  source 1..12: note = Severe acute respiratory syndrome coronavirus 2
EFRYMNSQGLLP

SEQ ID NO: 19564 - protein, 14 aa, Severe acute respiratory syndrome-related coronavirus
  REGION 1..14: note = Table B: HLA-DRB1*01:02L HLA-DPA1*03:01-B1*105:01L
  source 1..14: note = Severe acute respiratory syndrome coronavirus 2
MNSQGLLPPKNSID

SEQ ID NO: 19565 - protein, 14 aa, Severe acute respiratory syndrome-related coronavirus
  REGION 1..14: note = Table B: HLA-DRB1*01:02L
  source 1..14: note = Severe acute respiratory syndrome coronavirus 2
QGLLPPKNSIDAFK

SEQ ID NO: 19566 - protein, 15 aa, Severe acute respiratory syndrome-related coronavirus
  REGION 1..15: note = Table B: HLA-DRB1*01:02L
  source 1..15: note = Severe acute respiratory syndrome coronavirus 2
VQSKMSDVKCTSVVL

SEQ ID NO: 19567 - protein, 12 aa, Severe acute respiratory syndrome-related coronavirus
  REGION 1..12: note = Table B: HLA-DRB1*01:02L
  source 1..12: note = Severe acute respiratory syndrome coronavirus 2
QLRVESSSKLWA

SEQ ID NO: 19568 - protein, 14 aa, Severe acute respiratory syndrome-related coronavirus
  REGION 1..14: note = Table B: HLA-DRB1*01:02L HLA-DRB1*15:03L
  source 1..14: note = Severe acute respiratory syndrome coronavirus 2
AQCVQLHNDILLAK

SEQ ID NO: 19569 - protein, 12 aa, Severe acute respiratory syndrome-related coronavirus
  REGION 1..12: note = Table B: HLA-DRB1*01:02L HLA-DRB1*15:03L
  source 1..12: note = Severe acute respiratory syndrome coronavirus 2
VQLHNDILLAKD

SEQ ID NO: 19570 - protein, 11 aa, Severe acute respiratory syndrome-related coronavirus
  REGION 1..11: note = Table B: HLA-DRB1*01:02L HLA-DPA1*01:03-B1*03:01L HLA-DPA1*02:01-B1*13:01L
  source 1..11: note = Severe acute respiratory syndrome coronavirus 2
TTEAFEKMVSL

SEQ ID NO: 19571 - protein, 14 aa, Severe acute respiratory syndrome-related coronavirus
  REGION 1..14: note = Table B: HLA-DRB1*01:02L
  source 1..14: note = Severe acute respiratory syndrome coronavirus 2
GAVDINKLCEEMLD

SEQ ID NO: 19572 - protein, 13 aa, Severe acute respiratory syndrome-related coronavirus
  REGION 1..13: note = Table B: HLA-DRB1*01:02L HLA-DQA1*05:05-B1*03:01L
  source 1..13: note = Severe acute respiratory syndrome coronavirus 2
NRATLQAIASEFS

SEQ ID NO: 19573 - protein, 14 aa, Severe acute respiratory syndrome-related coronavirus
  REGION 1..14: note = Table B: HLA-DRB1*01:02L
  source 1..14: note = Severe acute respiratory syndrome coronavirus 2
ATLQAIASEFSSLP

SEQ ID NO: 19574 - protein, 15 aa, Severe acute respiratory syndrome-related coronavirus
  REGION 1..15: note = Table B: HLA-DRB1*01:02L HLA-DRB1*04:08L
  source 1..15: note = Severe acute respiratory syndrome coronavirus 2
LQAIASEFSSLPSYA

SEQ ID NO: 19575 - protein, 12 aa, Severe acute respiratory syndrome-related coronavirus
  REGION 1..12: note = Table B: HLA-DRB1*01:02L HLA-DRB4*03:01NL HLA-DQA1*01:01-B1*05:01L HLA-DRB1*08:01L HLA-DQA1*01-B1*05L HLA-DQA1*05:05-B1*03:116L HLA-DRB1*04:10L HLA-DRB1*12:01L HLA-DRB1*12:02L HLA-DRB1*14:54L HLA-DRB1*10:01L HLA-DRB1*04:08L
  REGION 1..12: note = CONT. FROM ABOVE: HLA-DRB1*08:03L
  source 1..12: note = Severe acute respiratory syndrome coronavirus 2
AAFATAQEAYEQ

SEQ ID NO: 19576 - protein, 12 aa, Severe acute respiratory syndrome-related coronavirus
  REGION 1..12: note = Table B: HLA-DRB1*01:02L HLA-DRB1*04:10L HLA-DPA1*02:01-B1*13:01L HLA-DRB1*07:01L HLA-DRB1*04:08L
  source 1..12: note = Severe acute respiratory syndrome coronavirus 2
AVANGDSEVVLK

SEQ ID NO: 19577 - protein, 12 aa, Severe acute respiratory syndrome-related coronavirus
  REGION 1..12: note = Table B: HLA-DRB1*01:02L HLA-DRB1*04:08L
  source 1..12: note = Severe acute respiratory syndrome coronavirus 2
VANGDSEVVLKK

SEQ ID NO: 19578 - protein, 15 aa, Severe acute respiratory syndrome-related coronavirus
  REGION 1..15: note = Table B: HLA-DRB1*01:02L
  source 1..15: note = Severe acute respiratory syndrome coronavirus 2
DRDAAMQRKLEKMAD

SEQ ID NO: 19579 - protein, 14 aa, Severe acute respiratory syndrome-related coronavirus
  REGION 1..14: note = Table B: HLA-DRB1*01:02L
  source 1..14: note = Severe acute respiratory syndrome coronavirus 2
LEKMADQAMTQMYK

SEQ ID NO: 19580 - protein, 14 aa, Severe acute respiratory syndrome-related coronavirus
  REGION 1..14: note = Table B: HLA-DRB1*01:02L
  source 1..14: note = Severe acute respiratory syndrome coronavirus 2
MADQAMTQMYKQAR

SEQ ID NO: 19581 - protein, 13 aa, Severe acute respiratory syndrome-related coronavirus
  REGION 1..13: note = Table B: HLA-DRB1*01:02L HLA-DRB1*16:01L HLA-DRB1*15:03L
  source 1..13: note = Severe acute respiratory syndrome coronavirus 2
QAMTQMYKQARSE

SEQ ID NO: 19582 - protein, 11 aa, Severe acute respiratory syndrome-related coronavirus
  REGION 1..11: note = Table B: HLA-DRB1*01:02L HLA-DRB1*16:01L
  source 1..11: note = Severe acute respiratory syndrome coronavirus 2
MYKQARSEDKR

SEQ ID NO: 19583 - protein, 12 aa, Severe acute respiratory syndrome-related coronavirus
  REGION 1..12: note = Table B: HLA-DRB1*01:02L HLA-DRB1*16:01L HLA-DRB1*04:08L
  source 1..12: note = Severe acute respiratory syndrome coronavirus 2
YKQARSEDKRAK

SEQ ID NO: 19584 - protein, 14 aa, Severe acute respiratory syndrome-related coronavirus
  REGION 1..14: note = Table B: HLA-DRB1*01:02L HLA-DPA1*01:03-B1*03:01L HLA-DRB1*12:01L
  source 1..14: note = Severe acute respiratory syndrome coronavirus 2
RAKVTSAMQTMLFT

SEQ ID NO: 19585 - protein, 14 aa, Severe acute respiratory syndrome-related coronavirus
  REGION 1..14: note = Table B: HLA-DRB1*01:02L
  source 1..14: note = Severe acute respiratory syndrome coronavirus 2
VTSAMQTMLFTMLR

SEQ ID NO: 19586 - protein, 13 aa, Severe acute respiratory syndrome-related coronavirus
  REGION 1..13: note = Table B: HLA-DRB1*01:02L HLA-DRB1*08:01L HLA-DPA1*01:03-B1*02:01L
  source 1..13: note = Severe acute respiratory syndrome coronavirus 2
SAMQTMLFTMLRK

SEQ ID NO: 19587 - protein, 13 aa, Severe acute respiratory syndrome-related coronavirus
  REGION 1..13: note = Table B: HLA-DRB1*01:02L HLA-DPA1*03:01-B1*04:02L HLA-DQA1*01:01-B1*05:01L HLA-DPA1*01:03-B1*104:01L
  source 1..13: note = Severe acute respiratory syndrome coronavirus 2
TAAKLMVVIPDYN

SEQ ID NO: 19588 - protein, 12 aa, Severe acute respiratory syndrome-related coronavirus
  REGION 1..12: note = Table B: HLA-DRB1*01:02L HLA-DRB3*02:01L
  source 1..12: note = Severe acute respiratory syndrome coronavirus 2
KLMVVIPDYNTY

SEQ ID NO: 19589 - protein, 11 aa, Severe acute respiratory syndrome-related coronavirus
  REGION 1..11: note = Table B: HLA-DRB1*01:02L
  source 1..11: note = Severe acute respiratory syndrome coronavirus 2
KIVQLSEISMD

SEQ ID NO: 19590 - protein, 13 aa, Severe acute respiratory syndrome-related coronavirus
  REGION 1..13: note = Table B: HLA-DRB1*01:02L
  source 1..13: note = Severe acute respiratory syndrome coronavirus 2
LAWPLIVTALRAN

SEQ ID NO: 19591 - protein, 13 aa, Severe acute respiratory syndrome-related coronavirus
  REGION 1..13: note = Table B: HLA-DRB1*01:02L
  source 1..13: note = Severe acute respiratory syndrome coronavirus 2
PLIVTALRANSAV

SEQ ID NO: 19592 - protein, 12 aa, Severe acute respiratory syndrome-related coronavirus
  REGION 1..12: note = Table B: HLA-DRB1*01:02L HLA-DRB1*04:08L
  source 1..12: note = Severe acute respiratory syndrome coronavirus 2
RANSAVKLQNNE

SEQ ID NO: 19593 - protein, 12 aa, Severe acute respiratory syndrome-related coronavirus
  REGION 1..12: note = Table B: HLA-DRB1*01:02L HLA-DRB1*15:03L
  source 1..12: note = Severe acute respiratory syndrome coronavirus 2
ANSAVKLQNNEL

SEQ ID NO: 19594 - protein, 14 aa, Severe acute respiratory syndrome-related coronavirus
  REGION 1..14: note = Table B: HLA-DRB1*01:02L
  source 1..14: note = Severe acute respiratory syndrome coronavirus 2
PVALRQMSCAAGTT

SEQ ID NO: 19595 - protein, 12 aa, Severe acute respiratory syndrome-related coronavirus
  REGION 1..12: note = Table B: HLA-DRB1*01:02L HLA-DRB1*08:04L HLA-DPA1*02:01-B1*13:01L HLA-DRB1*15:03L
  source 1..12: note = Severe acute respiratory syndrome coronavirus 2
VLALLSDLQDLK

SEQ ID NO: 19596 - protein, 14 aa, Severe acute respiratory syndrome-related coronavirus
  REGION 1..14: note = Table B: HLA-DRB1*01:02L HLA-DRB3*01:01L
  source 1..14: note = Severe acute respiratory syndrome coronavirus 2
LALLSDLQDLKWAR

SEQ ID NO: 19597 - protein, 13 aa, Severe acute respiratory syndrome-related coronavirus
  REGION 1..13: note = Table B: HLA-DRB1*01:02L HLA-DRB1*12:01L HLA-DQA1*01:03-B1*06:01L HLA-DQA1*02:01-B1*03:03L HLA-DRB1*15:03L
  source 1..13: note = Severe acute respiratory syndrome coronavirus 2
SDLQDLKWARFPK

SEQ ID NO: 19598 - protein, 14 aa, Severe acute respiratory syndrome-related coronavirus
  REGION 1..14: note = Table B: HLA-DRB1*01:02L HLA-DPA1*02:01-B1*13:01L
  source 1..14: note = Severe acute respiratory syndrome coronavirus 2
EPPCRFVTDTPKGP

SEQ ID NO: 19599 - protein, 13 aa, Severe acute respiratory syndrome-related coronavirus
  REGION 1..13: note = Table B: HLA-DRB1*01:02L HLA-DQA1*05:05-B1*03:116L HLA-DRB3*01:01L HLA-DRB1*08:02L HLA-DRB1*15:03L
  source 1..13: note = Severe acute respiratory syndrome coronavirus 2
LGSLAATVRLQAG

SEQ ID NO: 19600 - protein, 16 aa, Severe acute respiratory syndrome-related coronavirus
  REGION 1..16: note = Table B: HLA-DRB1*01:02L HLA-DPA1*01:03-B1*03:01L HLA-DRB1*12:01L HLA-DPA1*01:03-B1*104:01L
  source 1..16: note = Severe acute respiratory syndrome coronavirus 2
VPANSTVLSFCAFAVD

SEQ ID NO: 19601 - protein, 15 aa, Severe acute respiratory syndrome-related coronavirus
  REGION 1..15: note = Table B: HLA-DRB1*01:02L HLA-DRB1*08:04L
  source 1..15: note = Severe acute respiratory syndrome coronavirus 2
QPITNCVKMLCTHTG

SEQ ID NO: 19602 - protein, 15 aa, Severe acute respiratory syndrome-related coronavirus
  REGION 1..15: note = Table B: HLA-DRB1*01:02L
  source 1..15: note = Severe acute respiratory syndrome coronavirus 2
ITVTPEANMDQESFG

SEQ ID NO: 19603 - protein, 15 aa, Severe acute respiratory syndrome-related coronavirus
  REGION 1..15: note = Table B: HLA-DRB1*01:02L
  source 1..15: note = Severe acute respiratory syndrome coronavirus 2
HPNPKGFCDLKGKYV

SEQ ID NO: 19604 - protein, 14 aa, Severe acute respiratory syndrome-related coronavirus
  REGION 1..14: note = Table B: HLA-DRB1*01:02L HLA-DRB1*14:01L HLA-DRB1*12:01L HLA-DRB1*16:01L HLA-DRB1*15:03L
  source 1..14: note = Severe acute respiratory syndrome coronavirus 2
NPKGFCDLKGKYVQ

SEQ ID NO: 19605 - protein, 13 aa, Severe acute respiratory syndrome-related coronavirus
  REGION 1..13: note = Table B: HLA-DRB1*01:02L
  source 1..13: note = Severe acute respiratory syndrome coronavirus 2
KYVQIPTTCANDP

SEQ ID NO: 19606 - protein, 12 aa, Severe acute respiratory syndrome-related coronavirus
  REGION 1..12: note = Table B: HLA-DRB1*01:02L
  source 1..12: note = Severe acute respiratory syndrome coronavirus 2
FLNRVCGVSAAR

SEQ ID NO: 19607 - protein, 14 aa, Severe acute respiratory syndrome-related coronavirus
  REGION 1..14: note = Table B: HLA-DRB1*01:02L HLA-DRB1*04:08L
  source 1..14: note = Severe acute respiratory syndrome coronavirus 2
GTGTSTDVVYRAFD

SEQ ID NO: 19608 - protein, 12 aa, Severe acute respiratory syndrome-related coronavirus
  REGION 1..12: note = Table B: HLA-DRB1*01:02L HLA-DRB1*08:01L HLA-DRB1*12:01L HLA-DRB1*15:03L
  source 1..12: note = Severe acute respiratory syndrome coronavirus 2
KVAGFAKFLKTN

SEQ ID NO: 19609 - protein, 14 aa, Severe acute respiratory syndrome-related coronavirus
  REGION 1..14: note = Table B: HLA-DRB1*01:02L HLA-DRB1*11:01L
  source 1..14: note = Severe acute respiratory syndrome coronavirus 2
VAGFAKFLKTNCCR

SEQ ID NO: 19610 - protein, 16 aa, Severe acute respiratory syndrome-related coronavirus
  REGION 1..16: note = Table B: HLA-DRB1*01:02L HLA-DPA1*02:01-B1*13:01L
  source 1..16: note = Severe acute respiratory syndrome coronavirus 2
LKTNCCRFQEKDEDDN

SEQ ID NO: 19611 - protein, 12 aa, Severe acute respiratory syndrome-related coronavirus
  REGION 1..12: note = Table B: HLA-DRB1*01:02L HLA-DRB1*12:01L HLA-DPA1*03:01-B1*105:01L HLA-DRB1*15:03L
  source 1..12: note = Severe acute respiratory syndrome coronavirus 2
LIDSYFVVKRHT

SEQ ID NO: 19612 - protein, 12 aa, Severe acute respiratory syndrome-related coronavirus
  REGION 1..12: note = Table B: HLA-DRB1*01:02L HLA-DRB1*16:01L HLA-DRB1*04:08L
  source 1..12: note = Severe acute respiratory syndrome coronavirus 2
VVKRHTFSNYQH

SEQ ID NO: 19613 - protein, 13 aa, Severe acute respiratory syndrome-related coronavirus
  REGION 1..13: note = Table B: HLA-DRB1*01:02L HLA-DRB1*08:01L HLA-DPA1*02:01-B1*13:01L
  source 1..13: note = Severe acute respiratory syndrome coronavirus 2
VKRHTFSNYQHEE

SEQ ID NO: 19614 - protein, 13 aa, Severe acute respiratory syndrome-related coronavirus
  REGION 1..13: note = Table B: HLA-DRB1*01:02L
  source 1..13: note = Severe acute respiratory syndrome coronavirus 2
ETIYNLLKDCPAV

SEQ ID NO: 19615 - protein, 12 aa, Severe acute respiratory syndrome-related coronavirus
  REGION 1..12: note = Table B: HLA-DRB1*01:02L HLA-DRB1*15:03L
  source 1..12: note = Severe acute respiratory syndrome coronavirus 2
LKDCPAVAKHDF

SEQ ID NO: 19616 - protein, 12 aa, Severe acute respiratory syndrome-related coronavirus
  REGION 1..12: note = Table B: HLA-DRB1*01:02L
  source 1..12: note = Severe acute respiratory syndrome coronavirus 2
PAVAKHDFFKFR

SEQ ID NO: 19617 - protein, 12 aa, Severe acute respiratory syndrome-related coronavirus
  REGION 1..12: note = Table B: HLA-DRB1*01:02L HLA-DRB1*04:08L
  source 1..12: note = Severe acute respiratory syndrome coronavirus 2
RIDGDMVPHISR

SEQ ID NO: 19618 - protein, 12 aa, Severe acute respiratory syndrome-related coronavirus
  REGION 1..12: note = Table B: HLA-DRB1*01:02L HLA-DRB3*01:01L HLA-DRB1*04:08L HLA-DRB1*15:03L
  source 1..12: note = Severe acute respiratory syndrome coronavirus 2
DMVPHISRQRLT

SEQ ID NO: 19619 - protein, 12 aa, Severe acute respiratory syndrome-related coronavirus
  REGION 1..12: note = Table B: HLA-DRB1*01:02L
  source 1..12: note = Severe acute respiratory syndrome coronavirus 2
MVPHISRQRLTK

SEQ ID NO: 19620 - protein, 13 aa, Severe acute respiratory syndrome-related coronavirus
  REGION 1..13: note = Table B: HLA-DRB1*01:02L HLA-DRB1*16:01L
  source 1..13: note = Severe acute respiratory syndrome coronavirus 2
VPHISRQRLTKYT

SEQ ID NO: 19621 - protein, 14 aa, Severe acute respiratory syndrome-related coronavirus
  REGION 1..14: note = Table B: HLA-DRB1*01:02L
  source 1..14: note = Severe acute respiratory syndrome coronavirus 2
ISRQRLTKYTMADL

SEQ ID NO: 19622 - protein, 14 aa, Severe acute respiratory syndrome-related coronavirus
  REGION 1..14: note = Table B: HLA-DRB1*01:02L
  source 1..14: note = Severe acute respiratory syndrome coronavirus 2
SRQRLTKYTMADLV

SEQ ID NO: 19623 - protein, 12 aa, Severe acute respiratory syndrome-related coronavirus
  REGION 1..12: note = Table B: HLA-DRB1*01:02L HLA-DRB1*04:08L
  source 1..12: note = Severe acute respiratory syndrome coronavirus 2
KYTMADLVYALR

SEQ ID NO: 19624 - protein, 12 aa, Severe acute respiratory syndrome-related coronavirus
  REGION 1..12: note = Table B: HLA-DRB1*01:02L
  source 1..12: note = Severe acute respiratory syndrome coronavirus 2
YTMADLVYALRH

SEQ ID NO: 19625 - protein, 14 aa, Severe acute respiratory syndrome-related coronavirus
  REGION 1..14: note = Table B: HLA-DRB1*01:02L
  source 1..14: note = Severe acute respiratory syndrome coronavirus 2
TMADLVYALRHFDE

SEQ ID NO: 19626 - protein, 13 aa, Severe acute respiratory syndrome-related coronavirus
  REGION 1..13: note = Table B: HLA-DRB1*01:02L HLA-DRB1*12:01L
  source 1..13: note = Severe acute respiratory syndrome coronavirus 2
VYALRHFDEGNCD

SEQ ID NO: 19627 - protein, 12 aa, Severe acute respiratory syndrome-related coronavirus
  REGION 1..12: note = Table B: HLA-DRB1*01:02L HLA-DQA1*01-B1*05L HLA-DRB1*16:01L HLA-DRB1*15:03L
  source 1..12: note = Severe acute respiratory syndrome coronavirus 2
ALRHFDEGNCDT

SEQ ID NO: 19628 - protein, 14 aa, Severe acute respiratory syndrome-related coronavirus
  REGION 1..14: note = Table B: HLA-DRB1*01:02L HLA-DRB1*04:08L
  source 1..14: note = Severe acute respiratory syndrome coronavirus 2
LRHFDEGNCDTLKE

SEQ ID NO: 19629 - protein, 14 aa, Severe acute respiratory syndrome-related coronavirus
  REGION 1..14: note = Table B: HLA-DRB1*01:02L
  source 1..14: note = Severe acute respiratory syndrome coronavirus 2
GNCDTLKEILVTYN

SEQ ID NO: 19630 - protein, 16 aa, Severe acute respiratory syndrome-related coronavirus
  REGION 1..16: note = Table B: HLA-DRB1*01:02L
  source 1..16: note = Severe acute respiratory syndrome coronavirus 2
DTLKEILVTYNCCDDD

SEQ ID NO: 19631 - protein, 14 aa, Severe acute respiratory syndrome-related coronavirus
  REGION 1..14: note = Table B: HLA-DRB1*01:02L HLA-DRB1*15:03L
  source 1..14: note = Severe acute respiratory syndrome coronavirus 2
VTYNCCDDDYFNKK

SEQ ID NO: 19632 - protein, 13 aa, Severe acute respiratory syndrome-related coronavirus
  REGION 1..13: note = Table B: HLA-DRB1*01:02L HLA-DRB1*08:01L HLA-DRB1*12:01L
  source 1..13: note = Severe acute respiratory syndrome coronavirus 2
KKDWYDFVENPDI

SEQ ID NO: 19633 - protein, 11 aa, Severe acute respiratory syndrome-related coronavirus
  REGION 1..11: note = Table B: HLA-DRB1*01:02L HLA-DRB1*08:77L HLA-DPA1*01:03-B1*03:01L HLA-DQA1*05:05-B1*03:19L HLA-DRB1*04:10L HLA-DRB1*10:01L HLA-DRB1*04:08L HLA-DRB1*15:03L
  source 1..11: note = Severe acute respiratory syndrome coronavirus 2
YDFVENPDILR

SEQ ID NO: 19634 - protein, 14 aa, Severe acute respiratory syndrome-related coronavirus
  REGION 1..14: note = Table B: HLA-DRB1*01:02L
  source 1..14: note = Severe acute respiratory syndrome coronavirus 2
ANLGERVRQALLKT

SEQ ID NO: 19635 - protein, 12 aa, Severe acute respiratory syndrome-related coronavirus
  REGION 1..12: note = Table B: HLA-DRB1*01:02L
  source 1..12: note = Severe acute respiratory syndrome coronavirus 2
ERVRQALLKTVQ

SEQ ID NO: 19636 - protein, 12 aa, Severe acute respiratory syndrome-related coronavirus
  REGION 1..12: note = Table B: HLA-DRB1*01:02L HLA-DRB1*12:01L
  source 1..12: note = Severe acute respiratory syndrome coronavirus 2
RVRQALLKTVQF

SEQ ID NO: 19637 - protein, 14 aa, Severe acute respiratory syndrome-related coronavirus
  REGION 1..14: note = Table B: HLA-DRB1*01:02L HLA-DRB1*08:01L HLA-DRB1*11:01L HLA-DRB1*12:01L HLA-DQA1*02:01-B1*03:03L HLA-DRB1*15:03L
  source 1..14: note = Severe acute respiratory syndrome coronavirus 2
QALLKTVQFCDAMR

SEQ ID NO: 19638 - protein, 14 aa, Severe acute respiratory syndrome-related coronavirus
  REGION 1..14: note = Table B: HLA-DRB1*01:02L HLA-DQA1*05:05-B1*03:19L HLA-DPA1*03:01-B1*105:01L HLA-DRB1*04:08L HLA-DRB1*15:03L
  source 1..14: note = Severe acute respiratory syndrome coronavirus 2
VQFCDAMRNAGIVG

SEQ ID NO: 19639 - protein, 14 aa, Severe acute respiratory syndrome-related coronavirus
  REGION 1..14: note = Table B: HLA-DRB1*01:02L HLA-DPA1*01:03-B1*03:01L HLA-DRB1*08:01L HLA-DQA1*05:05-B1*03:19L HLA-DRB1*12:01L HLA-DRB1*15:03L
  source 1..14: note = Severe acute respiratory syndrome coronavirus 2
NWYDFGDFIQTTPG

SEQ ID NO: 19640 - protein, 13 aa, Severe acute respiratory syndrome-related coronavirus
  REGION 1..13: note = Table B: HLA-DRB1*01:02L HLA-DPA1*01:02-B1*04:01L
  source 1..13: note = Severe acute respiratory syndrome coronavirus 2
VDSYYSLLMPILT

SEQ ID NO: 19641 - protein, 13 aa, Severe acute respiratory syndrome-related coronavirus
  REGION 1..13: note = Table B: HLA-DRB1*01:02L
  source 1..13: note = Severe acute respiratory syndrome coronavirus 2
SYYSLLMPILTLT

SEQ ID NO: 19642 - protein, 14 aa, Severe acute respiratory syndrome-related coronavirus
  REGION 1..14: note = Table B: HLA-DRB1*01:02L HLA-DPA1*03:01-B1*105:01L
  source 1..14: note = Severe acute respiratory syndrome coronavirus 2
SLLMPILTLTRALT

SEQ ID NO: 19643 - protein, 16 aa, Severe acute respiratory syndrome-related coronavirus
  REGION 1..16: note = Table B: HLA-DRB1*01:02L
  source 1..16: note = Severe acute respiratory syndrome coronavirus 2
RALTAESHVDTDLTKP

SEQ ID NO: 19644 - protein, 12 aa, Severe acute respiratory syndrome-related coronavirus
  REGION 1..12: note = Table B: HLA-DRB1*01:02L HLA-DRB3*01:01L HLA-DRB1*04:08L
  source 1..12: note = Severe acute respiratory syndrome coronavirus 2
HVDTDLTKPYIK

SEQ ID NO: 19645 - protein, 15 aa, Severe acute respiratory syndrome-related coronavirus
  REGION 1..15: note = Table B: HLA-DRB1*01:02L
  source 1..15: note = Severe acute respiratory syndrome coronavirus 2
DTDLTKPYIKWDLLK

SEQ ID NO: 19646 - protein, 12 aa, Severe acute respiratory syndrome-related coronavirus
  REGION 1..12: note = Table B: HLA-DRB1*01:02L HLA-DPA1*03:01-B1*04:02L HLA-DRB1*08:01L HLA-DQA1*01-B1*05L HLA-DRB1*12:01L HLA-DPA1*03:01-B1*105:01L HLA-DPA1*01:02-B1*04:01L HLA-DRB1*04:08L HLA-DRB1*15:03L
  source 1..12: note = Severe acute respiratory syndrome coronavirus 2
KPYIKWDLLKYD

SEQ ID NO: 19647 - protein, 13 aa, Severe acute respiratory syndrome-related coronavirus
  REGION 1..13: note = Table B: HLA-DRB1*01:02L HLA-DRB1*08:04L HLA-DPA1*01:03-B1*03:01L HLA-DPA1*03:01-B1*04:02L HLA-DRB1*14:01L HLA-DRB3*01:01L HLA-DPA1*02:01-B1*13:01L HLA-DRB1*04:08L
  source 1..13: note = Severe acute respiratory syndrome coronavirus 2
WDLLKYDFTEERL

SEQ ID NO: 19648 - protein, 13 aa, Severe acute respiratory syndrome-related coronavirus
  REGION 1..13: note = Table B: HLA-DRB1*01:02L HLA-DPA1*01:02-B1*04:01L HLA-DRB1*15:03L
  source 1..13: note = Severe acute respiratory syndrome coronavirus 2
DFTEERLKLFDRY

SEQ ID NO: 19649 - protein, 13 aa, Severe acute respiratory syndrome-related coronavirus
  REGION 1..13: note = Table B: HLA-DRB1*01:02L
  source 1..13: note = Severe acute respiratory syndrome coronavirus 2
TEERLKLFDRYFK

SEQ ID NO: 19650 - protein, 13 aa, Severe acute respiratory syndrome-related coronavirus
  REGION 1..13: note = Table B: HLA-DRB1*01:02L HLA-DRB1*08:01L HLA-DQA1*01-B1*05L HLA-DRB1*12:01L HLA-DPA1*01:02-B1*04:01L HLA-DRB1*04:08L HLA-DRB1*15:03L
  source 1..13: note = Severe acute respiratory syndrome coronavirus 2
DRYFKYWDQTYHP

SEQ ID NO: 19651 - protein, 14 aa, Severe acute respiratory syndrome-related coronavirus
  REGION 1..14: note = Table B: HLA-DRB1*01:02L HLA-DRB1*15:03L
  source 1..14: note = Severe acute respiratory syndrome coronavirus 2
QTYHPNCVNCLDDR

SEQ ID NO: 19652 - protein, 15 aa, Severe acute respiratory syndrome-related coronavirus
  REGION 1..15: note = Table B: HLA-DRB1*01:02L
  source 1..15: note = Severe acute respiratory syndrome coronavirus 2
HPNCVNCLDDRCILH

SEQ ID NO: 19653 - protein, 14 aa, Severe acute respiratory syndrome-related coronavirus
  REGION 1..14: note = Table B: HLA-DRB1*01:02L HLA-DPA1*01:03-B1*03:01L HLA-DPA1*02:01-B1*13:01L
  source 1..14: note = Severe acute respiratory syndrome coronavirus 2
DDRCILHCANFNVL

SEQ ID NO: 19654 - protein, 14 aa, Severe acute respiratory syndrome-related coronavirus
  REGION 1..14: note = Table B: HLA-DRB1*01:02L HLA-DPA1*01:03-B1*04:02L
  source 1..14: note = Severe acute respiratory syndrome coronavirus 2
NVLFSTVFPPTSFG

SEQ ID NO: 19655 - protein, 14 aa, Severe acute respiratory syndrome-related coronavirus
  REGION 1..14: note = Table B: HLA-DRB1*01:02L HLA-DPA1*01:03-B1*04:02L
  source 1..14: note = Severe acute respiratory syndrome coronavirus 2
VLFSTVFPPTSFGP

SEQ ID NO: 19656 - protein, 13 aa, Severe acute respiratory syndrome-related coronavirus
  REGION 1..13: note = Table B: HLA-DRB1*01:02L HLA-DPA1*01:03-B1*03:01L HLA-DQA1*05:05-B1*03:01L
  source 1..13: note = Severe acute respiratory syndrome coronavirus 2
FSTVFPPTSFGPL

SEQ ID NO: 19657 - protein, 13 aa, Severe acute respiratory syndrome-related coronavirus
  REGION 1..13: note = Table B: HLA-DRB1*01:02L
  source 1..13: note = Severe acute respiratory syndrome coronavirus 2
TVFPPTSFGPLVR

SEQ ID NO: 19658 - protein, 12 aa, Severe acute respiratory syndrome-related coronavirus
  REGION 1..12: note = Table B: HLA-DRB1*01:02L HLA-DRB1*16:01L
  source 1..12: note = Severe acute respiratory syndrome coronavirus 2
FPPTSFGPLVRK

SEQ ID NO: 19659 - protein, 16 aa, Severe acute respiratory syndrome-related coronavirus
  REGION 1..16: note = Table B: HLA-DRB1*01:02L HLA-DRB1*08:04L HLA-DRB1*11:04L HLA-DRB1*11:01L
  source 1..16: note = Severe acute respiratory syndrome coronavirus 2
PPTSFGPLVRKIFVDG

SEQ ID NO: 19660 - protein, 13 aa, Severe acute respiratory syndrome-related coronavirus
  REGION 1..13: note = Table B: HLA-DRB1*01:02L HLA-DRB1*16:01L HLA-DRB1*15:03L
  source 1..13: note = Severe acute respiratory syndrome coronavirus 2
PLVRKIFVDGVPF

SEQ ID NO: 19661 - protein, 14 aa, Severe acute respiratory syndrome-related coronavirus
  REGION 1..14: note = Table B: HLA-DRB1*01:02L
  source 1..14: note = Severe acute respiratory syndrome coronavirus 2
VHNQDVNLHSSRLS

SEQ ID NO: 19662 - protein, 13 aa, Severe acute respiratory syndrome-related coronavirus
  REGION 1..13: note = Table B: HLA-DRB1*01:02L HLA-DRB1*12:01L HLA-DRB1*04:08L HLA-DRB1*15:03L
  source 1..13: note = Severe acute respiratory syndrome coronavirus 2
SFKELLVYAADPA

SEQ ID NO: 19663 - protein, 12 aa, Severe acute respiratory syndrome-related coronavirus
  REGION 1..12: note = Table B: HLA-DRB1*01:02L
  source 1..12: note = Severe acute respiratory syndrome coronavirus 2
AMHAASGNLLLD

SEQ ID NO: 19664 - protein, 15 aa, Severe acute respiratory syndrome-related coronavirus
  REGION 1..15: note = Table B: HLA-DRB1*01:02L HLA-DPA1*03:01-B1*105:01L HLA-DQA1*05:05-B1*03:01L HLA-DQA1*01:03-B1*06:01L HLA-DQA1*02:01-B1*03:03L
  source 1..15: note = Severe acute respiratory syndrome coronavirus 2
DKRTTCFSVAALTNN

SEQ ID NO: 19665 - protein, 15 aa, Severe acute respiratory syndrome-related coronavirus
  REGION 1..15: note = Table B: HLA-DRB1*01:02L
  source 1..15: note = Severe acute respiratory syndrome coronavirus 2
RTTCFSVAALTNNVA

SEQ ID NO: 19666 - protein, 11 aa, Severe acute respiratory syndrome-related coronavirus
  REGION 1..11: note = Table B: HLA-DRB1*01:02L HLA-DRB4*03:01NL HLA-DPA1*03:01-B1*04:02L HLA-DQA1*01-B1*05L HLA-DPA1*01:03-B1*04:01L HLA-DPA1*01:03-B1*04:02L HLA-DQA1*05:05-B1*03:01L HLA-DPA1*01:02-B1*04:01L
  REGION 1..11: note = CONT. FROM ABOVE: HLA-DRB1*10:01L
  source 1..11: note = Severe acute respiratory syndrome coronavirus 2
SVAALTNNVAF

SEQ ID NO: 19667 - protein, 13 aa, Severe acute respiratory syndrome-related coronavirus
  REGION 1..13: note = Table B: HLA-DRB1*01:02L HLA-DRB1*08:04L HLA-DRB1*15:03L
  source 1..13: note = Severe acute respiratory syndrome coronavirus 2
LTNNVAFQTVKPG

SEQ ID NO: 19668 - protein, 15 aa, Severe acute respiratory syndrome-related coronavirus
  REGION 1..15: note = Table B: HLA-DRB1*01:02L
  source 1..15: note = Severe acute respiratory syndrome coronavirus 2
PGNFNKDFYDFAVSK

SEQ ID NO: 19669 - protein, 15 aa, Severe acute respiratory syndrome-related coronavirus
  REGION 1..15: note = Table B: HLA-DRB1*01:02L HLA-DRB1*08:01L
  source 1..15: note = Severe acute respiratory syndrome coronavirus 2
AQDGNAAISDYDYYR

SEQ ID NO: 19670 - protein, 12 aa, Severe acute respiratory syndrome-related coronavirus
  REGION 1..12: note = Table B: HLA-DRB1*01:02L HLA-DRB1*14:01L
  source 1..12: note = Severe acute respiratory syndrome coronavirus 2
AAISDYDYYRYN

SEQ ID NO: 19671 - protein, 14 aa, Severe acute respiratory syndrome-related coronavirus
  REGION 1..14: note = Table B: HLA-DRB1*01:02L HLA-DRB1*14:01L
  source 1..14: note = Severe acute respiratory syndrome coronavirus 2
AISDYDYYRYNLPT

SEQ ID NO: 19672 - protein, 13 aa, Severe acute respiratory syndrome-related coronavirus
  REGION 1..13: note = Table B: HLA-DRB1*01:02L HLA-DPA1*03:01-B1*105:01L HLA-DRB1*16:01L HLA-DRB1*15:03L
  source 1..13: note = Severe acute respiratory syndrome coronavirus 2
DKYFDCYDGGCIN

SEQ ID NO: 19673 - protein, 14 aa, Severe acute respiratory syndrome-related coronavirus
  REGION 1..14: note = Table B: HLA-DRB1*01:02L HLA-DRB1*08:01L
  source 1..14: note = Severe acute respiratory syndrome coronavirus 2
PFNKWGKARLYYDS

SEQ ID NO: 19674 - protein, 14 aa, Severe acute respiratory syndrome-related coronavirus
  REGION 1..14: note = Table B: HLA-DRB1*01:02L HLA-DRB1*08:04L HLA-DPA1*01:03-B1*03:01L HLA-DPA1*01:03-B1*04:02L HLA-DPA1*01:02-B1*04:01L HLA-DQA1*01:03-B1*06:01L
  source 1..14: note = Severe acute respiratory syndrome coronavirus 2
ARLYYDSMSYEDQD

SEQ ID NO: 19675 - protein, 14 aa, Severe acute respiratory syndrome-related coronavirus
  REGION 1..14: note = Table B: HLA-DRB1*01:02L HLA-DRB1*04:08L
  source 1..14: note = Severe acute respiratory syndrome coronavirus 2
SMSYEDQDALFAYT

SEQ ID NO: 19676 - protein, 13 aa, Severe acute respiratory syndrome-related coronavirus
  REGION 1..13: note = Table B: HLA-DRB1*01:02L HLA-DQA1*05:05-B1*03:01L HLA-DRB1*04:08L
  source 1..13: note = Severe acute respiratory syndrome coronavirus 2
SYEDQDALFAYTK

SEQ ID NO: 19677 - protein, 13 aa, Severe acute respiratory syndrome-related coronavirus
  REGION 1..13: note = Table B: HLA-DRB1*01:02L HLA-DPA1*01:03-B1*03:01L HLA-DPA1*02:01-B1*13:01L HLA-DRB1*16:01L HLA-DRB1*15:03L
  source 1..13: note = Severe acute respiratory syndrome coronavirus 2
TKRNVIPTITQMN

SEQ ID NO: 19678 - protein, 14 aa, Severe acute respiratory syndrome-related coronavirus
  REGION 1..14: note = Table B: HLA-DRB1*01:02L HLA-DPA1*03:01-B1*105:01L
  source 1..14: note = Severe acute respiratory syndrome coronavirus 2
TVAGVSICSTMTNR

SEQ ID NO: 19679 - protein, 12 aa, Severe acute respiratory syndrome-related coronavirus
  REGION 1..12: note = Table B: HLA-DRB1*01:02L HLA-DRB1*12:01L HLA-DPA1*03:01-B1*105:01L HLA-DRB1*15:03L
  source 1..12: note = Severe acute respiratory syndrome coronavirus 2
VSICSTMTNRQF

SEQ ID NO: 19680 - protein, 13 aa, Severe acute respiratory syndrome-related coronavirus
  REGION 1..13: note = Table B: HLA-DRB1*01:02L
  source 1..13: note = Severe acute respiratory syndrome coronavirus 2
ICSTMTNRQFHQK

SEQ ID NO: 19681 - protein, 14 aa, Severe acute respiratory syndrome-related coronavirus
  REGION 1..14: note = Table B: HLA-DRB1*01:02L
  source 1..14: note = Severe acute respiratory syndrome coronavirus 2
STMTNRQFHQKLLK

SEQ ID NO: 19682 - protein, 14 aa, Severe acute respiratory syndrome-related coronavirus
  REGION 1..14: note = Table B: HLA-DRB1*01:02L
  source 1..14: note = Severe acute respiratory syndrome coronavirus 2
TMTNRQFHQKLLKS

SEQ ID NO: 19683 - protein, 14 aa, Severe acute respiratory syndrome-related coronavirus
  REGION 1..14: note = Table B: HLA-DRB1*01:02L HLA-DRB1*11:01L HLA-DRB1*12:01L HLA-DPA1*03:01-B1*105:01L HLA-DRB1*15:03L
  source 1..14: note = Severe acute respiratory syndrome coronavirus 2
RQFHQKLLKSIAAT

SEQ ID NO: 19684 - protein, 13 aa, Severe acute respiratory syndrome-related coronavirus
  REGION 1..13: note = Table B: HLA-DRB1*01:02L
  source 1..13: note = Severe acute respiratory syndrome coronavirus 2
FHQKLLKSIAATR

SEQ ID NO: 19685 - protein, 12 aa, Severe acute respiratory syndrome-related coronavirus
  REGION 1..12: note = Table B: HLA-DRB1*01:02L
  source 1..12: note = Severe acute respiratory syndrome coronavirus 2
KLLKSIAATRGA

SEQ ID NO: 19686 - protein, 13 aa, Severe acute respiratory syndrome-related coronavirus
  REGION 1..13: note = Table B: HLA-DRB1*01:02L HLA-DRB1*08:04L
  source 1..13: note = Severe acute respiratory syndrome coronavirus 2
GATVVIGTSKFYG

SEQ ID NO: 19687 - protein, 14 aa, Severe acute respiratory syndrome-related coronavirus
  REGION 1..14: note = Table B: HLA-DRB1*01:02L
  source 1..14: note = Severe acute respiratory syndrome coronavirus 2
ATVVIGTSKFYGGW

SEQ ID NO: 19688 - protein, 14 aa, Severe acute respiratory syndrome-related coronavirus
  REGION 1..14: note = Table B: HLA-DRB1*01:02L HLA-DRB1*16:01L
  source 1..14: note = Severe acute respiratory syndrome coronavirus 2
MPNMLRIMASLVLA

SEQ ID NO: 19689 - protein, 14 aa, Severe acute respiratory syndrome-related coronavirus
  REGION 1..14: note = Table B: HLA-DRB1*01:02L
  source 1..14: note = Severe acute respiratory syndrome coronavirus 2
KHTTCCSLSHRFYR

SEQ ID NO: 19690 - protein, 14 aa, Severe acute respiratory syndrome-related coronavirus
  REGION 1..14: note = Table B: HLA-DRB1*01:02L HLA-DRB1*15:03L
  source 1..14: note = Severe acute respiratory syndrome coronavirus 2
LSEMVMCGGSLYVK

SEQ ID NO: 19691 - protein, 16 aa, Severe acute respiratory syndrome-related coronavirus
  REGION 1..16: note = Table B: HLA-DRB1*01:02L
  source 1..16: note = Severe acute respiratory syndrome coronavirus 2
YVKPGGTSSGDATTAY

SEQ ID NO: 19692 - protein, 13 aa, Severe acute respiratory syndrome-related coronavirus
  REGION 1..13: note = Table B: HLA-DRB1*01:02L HLA-DRB1*08:01L HLA-DRB1*11:01L HLA-DPA1*01:03-B1*104:01L
  source 1..13: note = Severe acute respiratory syndrome coronavirus 2
TTAYANSVFNICQ

SEQ ID NO: 19693 - protein, 11 aa, Severe acute respiratory syndrome-related coronavirus
  REGION 1..11: note = Table B: HLA-DRB1*01:02L
  source 1..11: note = Severe acute respiratory syndrome coronavirus 2
LLSTDGNKIAD

SEQ ID NO: 19694 - protein, 14 aa, Severe acute respiratory syndrome-related coronavirus
  REGION 1..14: note = Table B: HLA-DRB1*01:02L
  source 1..14: note = Severe acute respiratory syndrome coronavirus 2
LSTDGNKIADKYVR

SEQ ID NO: 19695 - protein, 13 aa, Severe acute respiratory syndrome-related coronavirus
  REGION 1..13: note = Table B: HLA-DRB1*01:02L
  source 1..13: note = Severe acute respiratory syndrome coronavirus 2
NKIADKYVRNLQH

SEQ ID NO: 19696 - protein, 13 aa, Severe acute respiratory syndrome-related coronavirus
  REGION 1..13: note = Table B: HLA-DRB1*01:02L HLA-DRB1*04:08L
  source 1..13: note = Severe acute respiratory syndrome coronavirus 2
KIADKYVRNLQHR

SEQ ID NO: 19697 - protein, 13 aa, Severe acute respiratory syndrome-related coronavirus
  REGION 1..13: note = Table B: HLA-DRB1*01:02L HLA-DRB1*04:08L
  source 1..13: note = Severe acute respiratory syndrome coronavirus 2
RNRDVDTDFVNEF

SEQ ID NO: 19698 - protein, 12 aa, Severe acute respiratory syndrome-related coronavirus
  REGION 1..12: note = Table B: HLA-DRB1*01:02L HLA-DRB1*08:01L HLA-DRB1*15:03L
  source 1..12: note = Severe acute respiratory syndrome coronavirus 2
TDFVNEFYAYLR

SEQ ID NO: 19699 - protein, 12 aa, Severe acute respiratory syndrome-related coronavirus
  REGION 1..12: note = Table B: HLA-DRB1*01:02L HLA-DRB1*11:04L HLA-DRB1*08:01L HLA-DRB1*11:01L HLA-DRB3*01:01L HLA-DRB1*15:03L
  source 1..12: note = Severe acute respiratory syndrome coronavirus 2
DFVNEFYAYLRK

SEQ ID NO: 19700 - protein, 14 aa, Severe acute respiratory syndrome-related coronavirus
  REGION 1..14: note = Table B: HLA-DRB1*01:02L HLA-DRB1*16:01L HLA-DRB1*15:03L
  source 1..14: note = Severe acute respiratory syndrome coronavirus 2
AYLRKHFSMMILSD

SEQ ID NO: 19701 - protein, 12 aa, Severe acute respiratory syndrome-related coronavirus
  REGION 1..12: note = Table B: HLA-DRB1*01:02L HLA-DPA1*01:03-B1*03:01L HLA-DRB1*03:01L HLA-DRB1*12:01L HLA-DRB1*16:01L HLA-DRB1*15:03L
  source 1..12: note = Severe acute respiratory syndrome coronavirus 2
MILSDDAVVCFN

SEQ ID NO: 19702 - protein, 12 aa, Severe acute respiratory syndrome-related coronavirus
  REGION 1..12: note = Table B: HLA-DRB1*01:02L HLA-DPA1*01:03-B1*04:02L HLA-DRB1*04:08L
  source 1..12: note = Severe acute respiratory syndrome coronavirus 2
TYASQGLVASIK

SEQ ID NO: 19703 - protein, 11 aa, Severe acute respiratory syndrome-related coronavirus
  REGION 1..11: note = Table B: HLA-DRB1*01:02L
  source 1..11: note = Severe acute respiratory syndrome coronavirus 2
ASIKNFKSVLY

SEQ ID NO: 19704 - protein, 14 aa, Severe acute respiratory syndrome-related coronavirus
  REGION 1..14: note = Table B: HLA-DRB1*01:02L HLA-DRB1*08:04L HLA-DPA1*01:03-B1*04:02L HLA-DQA1*05:05-B1*03:01L HLA-DRB1*04:08L
  source 1..14: note = Severe acute respiratory syndrome coronavirus 2
NNVFMSEAKCWTET

SEQ ID NO: 19705 - protein, 14 aa, Severe acute respiratory syndrome-related coronavirus
  REGION 1..14: note = Table B: HLA-DRB1*01:02L HLA-DRB1*08:01L HLA-DRB1*04:08L
  source 1..14: note = Severe acute respiratory syndrome coronavirus 2
AKCWTETDLTKGPH

SEQ ID NO: 19706 - protein, 15 aa, Severe acute respiratory syndrome-related coronavirus
  REGION 1..15: note = Table B: HLA-DRB1*01:02L HLA-DPA1*02:01-B1*13:01L
  source 1..15: note = Severe acute respiratory syndrome coronavirus 2
DLTKGPHEFCSQHTM

SEQ ID NO: 19707 - protein, 15 aa, Severe acute respiratory syndrome-related coronavirus
  REGION 1..15: note = Table B: HLA-DRB1*01:02L
  source 1..15: note = Severe acute respiratory syndrome coronavirus 2
EFCSQHTMLVKQGDD

SEQ ID NO: 19708 - protein, 13 aa, Severe acute respiratory syndrome-related coronavirus
  REGION 1..13: note = Table B: HLA-DRB1*01:02L HLA-DRB1*14:01L HLA-DPA1*02:01-B1*13:01L HLA-DPA1*01:02-B1*04:01L HLA-DRB1*04:08L
  source 1..13: note = Severe acute respiratory syndrome coronavirus 2
SQHTMLVKQGDDY

SEQ ID NO: 19709 - protein, 14 aa, Severe acute respiratory syndrome-related coronavirus
  REGION 1..14: note = Table B: HLA-DRB1*01:02L
  source 1..14: note = Severe acute respiratory syndrome coronavirus 2
QHTMLVKQGDDYVY

SEQ ID NO: 19710 - protein, 15 aa, Severe acute respiratory syndrome-related coronavirus
  REGION 1..15: note = Table B: HLA-DRB1*01:02L
  source 1..15: note = Severe acute respiratory syndrome coronavirus 2
HTMLVKQGDDYVYLP

SEQ ID NO: 19711 - protein, 16 aa, Severe acute respiratory syndrome-related coronavirus
  REGION 1..16: note = Table B: HLA-DRB1*01:02L
  source 1..16: note = Severe acute respiratory syndrome coronavirus 2
VKQGDDYVYLPYPDPS

SEQ ID NO: 19712 - protein, 19 aa, Severe acute respiratory syndrome-related coronavirus
  REGION 1..19: note = Table B: HLA-DRB1*01:02L
  source 1..19: note = Severe acute respiratory syndrome coronavirus 2
YPDPSRILGAGCFVDDIVK

SEQ ID NO: 19713 - protein, 12 aa, Severe acute respiratory syndrome-related coronavirus
  REGION 1..12: note = Table B: HLA-DRB1*01:02L
  source 1..12: note = Severe acute respiratory syndrome coronavirus 2
VKTDGTLMIERF

SEQ ID NO: 19714 - protein, 12 aa, Severe acute respiratory syndrome-related coronavirus
  REGION 1..12: note = Table B: HLA-DRB1*01:02L HLA-DPA1*01:03-B1*03:01L HLA-DPA1*03:01-B1*04:02L HLA-DRB1*12:01L HLA-DPA1*02:01-B1*13:01L HLA-DPA1*03:01-B1*105:01L HLA-DRB1*16:01L
  source 1..12: note = Severe acute respiratory syndrome coronavirus 2
MIERFVSLAIDA

SEQ ID NO: 19715 - protein, 12 aa, Severe acute respiratory syndrome-related coronavirus
  REGION 1..12: note = Table B: HLA-DRB1*01:02L HLA-DPA1*01:03-B1*03:01L HLA-DPA1*03:01-B1*04:02L HLA-DQA1*05:01-B1*02:01L HLA-DRB1*12:01L HLA-DPA1*03:01-B1*105:01L HLA-DPA1*01:03-B1*104:01L
  source 1..12: note = Severe acute respiratory syndrome coronavirus 2
IERFVSLAIDAY

SEQ ID NO: 19716 - protein, 12 aa, Severe acute respiratory syndrome-related coronavirus
  REGION 1..12: note = Table B: HLA-DRB1*01:02L
  source 1..12: note = Severe acute respiratory syndrome coronavirus 2
AYPLTKHPNQEY

SEQ ID NO: 19717 - protein, 12 aa, Severe acute respiratory syndrome-related coronavirus
  REGION 1..12: note = Table B: HLA-DRB1*01:02L
  source 1..12: note = Severe acute respiratory syndrome coronavirus 2
YPLTKHPNQEYA

SEQ ID NO: 19718 - protein, 13 aa, Severe acute respiratory syndrome-related coronavirus
  REGION 1..13: note = Table B: HLA-DRB1*01:02L HLA-DPA1*02:01-B1*13:01L
  source 1..13: note = Severe acute respiratory syndrome coronavirus 2
TKHPNQEYADVFH

SEQ ID NO: 19719 - protein, 13 aa, Severe acute respiratory syndrome-related coronavirus
  REGION 1..13: note = Table B: HLA-DRB1*01:02L HLA-DRB3*02:01L
  source 1..13: note = Severe acute respiratory syndrome coronavirus 2
HPNQEYADVFHLY

SEQ ID NO: 19720 - protein, 12 aa, Severe acute respiratory syndrome-related coronavirus
  REGION 1..12: note = Table B: HLA-DRB1*01:02L HLA-DRB1*16:01L HLA-DRB1*15:03L
  source 1..12: note = Severe acute respiratory syndrome coronavirus 2
FHLYLQYIRKLH

SEQ ID NO: 19721 - protein, 13 aa, Severe acute respiratory syndrome-related coronavirus
  REGION 1..13: note = Table B: HLA-DRB1*01:02L
  source 1..13: note = Severe acute respiratory syndrome coronavirus 2
RKLHDELTGHMLD

SEQ ID NO: 19722 - protein, 12 aa, Severe acute respiratory syndrome-related coronavirus
  REGION 1..12: note = Table B: HLA-DRB1*01:02L
  source 1..12: note = Severe acute respiratory syndrome coronavirus 2
DELTGHMLDMYS

SEQ ID NO: 19723 - protein, 14 aa, Severe acute respiratory syndrome-related coronavirus
  REGION 1..14: note = Table B: HLA-DRB1*01:02L
  source 1..14: note = Severe acute respiratory syndrome coronavirus 2
HMLDMYSVMLTNDN

SEQ ID NO: 19724 - protein, 12 aa, Severe acute respiratory syndrome-related coronavirus
  REGION 1..12: note = Table B: HLA-DRB1*01:02L HLA-DRB1*08:04L HLA-DRB3*02:01L
  source 1..12: note = Severe acute respiratory syndrome coronavirus 2
VMLTNDNTSRYW

SEQ ID NO: 19725 - protein, 14 aa, Severe acute respiratory syndrome-related coronavirus
  REGION 1..14: note = Table B: HLA-DRB1*01:02L
  source 1..14: note = Severe acute respiratory syndrome coronavirus 2
SQTSLRCGACIRRP

SEQ ID NO: 19726 - protein, 14 aa, Severe acute respiratory syndrome-related coronavirus
  REGION 1..14: note = Table B: HLA-DRB1*01:02L
  source 1..14: note = Severe acute respiratory syndrome coronavirus 2
QTSLRCGACIRRPF

SEQ ID NO: 19727 - protein, 15 aa, Severe acute respiratory syndrome-related coronavirus
  REGION 1..15: note = Table B: HLA-DRB1*01:02L HLA-DPA1*02:01-B1*13:01L HLA-DPA1*03:01-B1*105:01L
  source 1..15: note = Severe acute respiratory syndrome coronavirus 2
VISTSHKLVLSVNPY

SEQ ID NO: 19728 - protein, 13 aa, Severe acute respiratory syndrome-related coronavirus
  REGION 1..13: note = Table B: HLA-DRB1*01:02L HLA-DRB1*12:01L HLA-DRB1*16:01L HLA-DRB1*15:03L
  source 1..13: note = Severe acute respiratory syndrome coronavirus 2
HKLVLSVNPYVCN

SEQ ID NO: 19729 - protein, 15 aa, Severe acute respiratory syndrome-related coronavirus
  REGION 1..15: note = Table B: HLA-DRB1*01:02L
  source 1..15: note = Severe acute respiratory syndrome coronavirus 2
DVTQLYLGGMSYYCK

SEQ ID NO: 19730 - protein, 15 aa, Severe acute respiratory syndrome-related coronavirus
  REGION 1..15: note = Table B: HLA-DRB1*01:02L
  source 1..15: note = Severe acute respiratory syndrome coronavirus 2
VTQLYLGGMSYYCKS

SEQ ID NO: 19731 - protein, 15 aa, Severe acute respiratory syndrome-related coronavirus
  REGION 1..15: note = Table B: HLA-DRB1*01:02L
  source 1..15: note = Severe acute respiratory syndrome coronavirus 2
TQLYLGGMSYYCKSH

SEQ ID NO: 19732 - protein, 16 aa, Severe acute respiratory syndrome-related coronavirus
  REGION 1..16: note = Table B: HLA-DRB1*01:02L HLA-DPA1*01:03-B1*03:01L HLA-DQA1*05:05-B1*03:19L HLA-DPA1*02:01-B1*13:01L HLA-DPA1*03:01-B1*105:01L HLA-DPA1*01:03-B1*104:01L HLA-DQA1*05:05-B1*03:01L HLA-DQA1*01:03-B1*06:01L
  REGION 1..16: note = CONT. FROM ABOVE: HLA-DQA1*02:01-B1*03:03L HLA-DRB1*15:03L
  source 1..16: note = Severe acute respiratory syndrome coronavirus 2
KPPISFPLCANGQVFG

SEQ ID NO: 19733 - protein, 12 aa, Severe acute respiratory syndrome-related coronavirus
  REGION 1..12: note = Table B: HLA-DRB1*01:02L HLA-DRB1*16:01L
  source 1..12: note = Severe acute respiratory syndrome coronavirus 2
QVFGLYKNTCVG

SEQ ID NO: 19734 - protein, 10 aa, Severe acute respiratory syndrome-related coronavirus
  REGION 1..10: note = Table B: HLA-DRB1*01:02L HLA-DQA1*01-B1*05L HLA-DRB1*16:01L HLA-DRB1*15:03L
  source 1..10: note = Severe acute respiratory syndrome coronavirus 2
LKLFAAETLK

SEQ ID NO: 19735 - protein, 13 aa, Severe acute respiratory syndrome-related coronavirus
  REGION 1..13: note = Table B: HLA-DRB1*01:02L
  source 1..13: note = Severe acute respiratory syndrome coronavirus 2
ETLKATEETFKLS

SEQ ID NO: 19736 - protein, 14 aa, Severe acute respiratory syndrome-related coronavirus
  REGION 1..14: note = Table B: HLA-DRB1*01:02L HLA-DPA1*02:01-B1*13:01L
  source 1..14: note = Severe acute respiratory syndrome coronavirus 2
TLKATEETFKLSYG

SEQ ID NO: 19737 - protein, 12 aa, Severe acute respiratory syndrome-related coronavirus
  REGION 1..12: note = Table B: HLA-DRB1*01:02L HLA-DPA1*01:03-B1*03:01L HLA-DRB1*12:01L
  source 1..12: note = Severe acute respiratory syndrome coronavirus 2
LSYGIATVREVL

SEQ ID NO: 19738 - protein, 12 aa, Severe acute respiratory syndrome-related coronavirus
  REGION 1..12: note = Table B: HLA-DRB1*01:02L
  source 1..12: note = Severe acute respiratory syndrome coronavirus 2
SYGIATVREVLS

SEQ ID NO: 19739 - protein, 14 aa, Severe acute respiratory syndrome-related coronavirus
  REGION 1..14: note = Table B: HLA-DRB1*01:02L HLA-DRB1*16:01L
  source 1..14: note = Severe acute respiratory syndrome coronavirus 2
DRELHLSWEVGKPR

SEQ ID NO: 19740 - protein, 12 aa, Severe acute respiratory syndrome-related coronavirus
  REGION 1..12: note = Table B: HLA-DRB1*01:02L HLA-DRB1*14:01L HLA-DRB1*08:01L HLA-DPA1*02:01-B1*13:01L HLA-DQA1*02:01-B1*03:03L HLA-DRB1*15:03L
  source 1..12: note = Severe acute respiratory syndrome coronavirus 2
NRNYVFTGYRVT

SEQ ID NO: 19741 - protein, 14 aa, Severe acute respiratory syndrome-related coronavirus
  REGION 1..14: note = Table B: HLA-DRB1*01:02L HLA-DRB1*12:01L HLA-DPA1*02:01-B1*13:01L HLA-DRB1*15:03L
  source 1..14: note = Severe acute respiratory syndrome coronavirus 2
SKVQIGEYTFEKGD

SEQ ID NO: 19742 - protein, 14 aa, Severe acute respiratory syndrome-related coronavirus
  REGION 1..14: note = Table B: HLA-DRB1*01:02L
  source 1..14: note = Severe acute respiratory syndrome coronavirus 2
YTFEKGDYGDAVVY

SEQ ID NO: 19743 - protein, 14 aa, Severe acute respiratory syndrome-related coronavirus
  REGION 1..14: note = Table B: HLA-DRB1*01:02L HLA-DRB1*04:08L
  source 1..14: note = Severe acute respiratory syndrome coronavirus 2
TFEKGDYGDAVVYR

SEQ ID NO: 19744 - protein, 14 aa, Severe acute respiratory syndrome-related coronavirus
  REGION 1..14: note = Table B: HLA-DRB1*01:02L
  source 1..14: note = Severe acute respiratory syndrome coronavirus 2
FEKGDYGDAVVYRG

SEQ ID NO: 19745 - protein, 10 aa, Severe acute respiratory syndrome-related coronavirus
  REGION 1..10: note = Table B: HLA-DRB1*01:02L HLA-DRB1*16:01L HLA-DQA1*02:01-B1*03:03L HLA-DRB1*15:03L
  source 1..10: note = Severe acute respiratory syndrome coronavirus 2
YRGTTTYKLN

SEQ ID NO: 19746 - protein, 13 aa, Severe acute respiratory syndrome-related coronavirus
  REGION 1..13: note = Table B: HLA-DRB1*01:02L HLA-DRB1*08:01L HLA-DRB1*04:08L
  source 1..13: note = Severe acute respiratory syndrome coronavirus 2
RGTTTYKLNVGDY

SEQ ID NO: 19747 - protein, 11 aa, Severe acute respiratory syndrome-related coronavirus
  REGION 1..11: note = Table B: HLA-DRB1*01:02L HLA-DRB1*12:01L HLA-DRB1*16:01L HLA-DRB1*15:03L
  source 1..11: note = Severe acute respiratory syndrome coronavirus 2
YFVLTSHTVMP

SEQ ID NO: 19748 - protein, 12 aa, Severe acute respiratory syndrome-related coronavirus
  REGION 1..12: note = Table B: HLA-DRB1*01:02L HLA-DPA1*01:03-B1*03:01L HLA-DQA1*05:05-B1*03:19L HLA-DRB1*15:03L
  source 1..12: note = Severe acute respiratory syndrome coronavirus 2
YVRITGLYPTLN

SEQ ID NO: 19749 - protein, 13 aa, Severe acute respiratory syndrome-related coronavirus
  REGION 1..13: note = Table B: HLA-DRB1*01:02L
  source 1..13: note = Severe acute respiratory syndrome coronavirus 2
RITGLYPTLNISD

SEQ ID NO: 19750 - protein, 15 aa, Severe acute respiratory syndrome-related coronavirus
  REGION 1..15: note = Table B: HLA-DRB1*01:02L HLA-DQA1*05:05-B1*03:01L
  source 1..15: note = Severe acute respiratory syndrome coronavirus 2
YPTLNISDEFSSNVA

SEQ ID NO: 19751 - protein, 12 aa, Severe acute respiratory syndrome-related coronavirus
  REGION 1..12: note = Table B: HLA-DRB1*01:02L
  source 1..12: note = Severe acute respiratory syndrome coronavirus 2
ANYQKVGMQKYS

SEQ ID NO: 19752 - protein, 12 aa, Severe acute respiratory syndrome-related coronavirus
  REGION 1..12: note = Table B: HLA-DRB1*01:02L
  source 1..12: note = Severe acute respiratory syndrome coronavirus 2
NYQKVGMQKYST

SEQ ID NO: 19753 - protein, 14 aa, Severe acute respiratory syndrome-related coronavirus
  REGION 1..14: note = Table B: HLA-DRB1*01:02L HLA-DQA1*01-B1*05L HLA-DRB1*04:08L HLA-DRB1*15:03L
  source 1..14: note = Severe acute respiratory syndrome coronavirus 2
KVGMQKYSTLQGPP

SEQ ID NO: 19754 - protein, 14 aa, Severe acute respiratory syndrome-related coronavirus
  REGION 1..14: note = Table B: HLA-DRB1*01:02L HLA-DPA1*01:03-B1*02:01L HLA-DQA1*05:05-B1*03:01L HLA-DRB1*04:08L
  source 1..14: note = Severe acute respiratory syndrome coronavirus 2
SHFAIGLALYYPSA

SEQ ID NO: 19755 - protein, 12 aa, Severe acute respiratory syndrome-related coronavirus
  REGION 1..12: note = Table B: HLA-DRB1*01:02L HLA-DRB1*12:01L
  source 1..12: note = Severe acute respiratory syndrome coronavirus 2
GLALYYPSARIV

SEQ ID NO: 19756 - protein, 15 aa, Severe acute respiratory syndrome-related coronavirus
  REGION 1..15: note = Table B: HLA-DRB1*01:02L HLA-DRB1*14:01L HLA-DRB1*12:01L HLA-DRB1*15:03L
  source 1..15: note = Severe acute respiratory syndrome coronavirus 2
VDALCEKALKYLPID

SEQ ID NO: 19757 - protein, 14 aa, Severe acute respiratory syndrome-related coronavirus
  REGION 1..14: note = Table B: HLA-DRB1*01:02L HLA-DRB1*14:01L HLA-DRB1*15:03L
  source 1..14: note = Severe acute respiratory syndrome coronavirus 2
LKYLPIDKCSRIIP

SEQ ID NO: 19758 - protein, 14 aa, Severe acute respiratory syndrome-related coronavirus
  REGION 1..14: note = Table B: HLA-DRB1*01:02L HLA-DRB1*04:08L
  source 1..14: note = Severe acute respiratory syndrome coronavirus 2
PIDKCSRIIPARAR

SEQ ID NO: 19759 - protein, 14 aa, Severe acute respiratory syndrome-related coronavirus
  REGION 1..14: note = Table B: HLA-DRB1*01:02L
  source 1..14: note = Severe acute respiratory syndrome coronavirus 2
IPARARVECFDKFK

SEQ ID NO: 19760 - protein, 13 aa, Severe acute respiratory syndrome-related coronavirus
  REGION 1..13: note = Table B: HLA-DRB1*01:02L HLA-DRB1*08:01L HLA-DRB3*01:01L HLA-DRB1*16:01L HLA-DRB1*04:08L
  source 1..13: note = Severe acute respiratory syndrome coronavirus 2
RARVECFDKFKVN

SEQ ID NO: 19761 - protein, 14 aa, Severe acute respiratory syndrome-related coronavirus
  REGION 1..14: note = Table B: HLA-DRB1*01:02L HLA-DPA1*03:01-B1*04:02L HLA-DPA1*01:03-B1*04:02L HLA-DRB1*04:08L HLA-DRB1*15:03L
  source 1..14: note = Severe acute respiratory syndrome coronavirus 2
QYVFCTVNALPETT

SEQ ID NO: 19762 - protein, 15 aa, Severe acute respiratory syndrome-related coronavirus
  REGION 1..15: note = Table B: HLA-DRB1*01:02L HLA-DPA1*01:03-B1*03:01L HLA-DPA1*03:01-B1*04:02L HLA-DPA1*01:03-B1*04:02L HLA-DPA1*02:01-B1*13:01L
  source 1..15: note = Severe acute respiratory syndrome coronavirus 2
LPETTADIVVFDEIS

SEQ ID NO: 19763 - protein, 14 aa, Severe acute respiratory syndrome-related coronavirus
  REGION 1..14: note = Table B: HLA-DRB1*01:02L HLA-DPA1*01:03-B1*03:01L HLA-DPA1*02:01-B1*13:01L HLA-DRB1*15:03L
  source 1..14: note = Severe acute respiratory syndrome coronavirus 2
SMATNYDLSVVNAR

SEQ ID NO: 19764 - protein, 13 aa, Severe acute respiratory syndrome-related coronavirus
  REGION 1..13: note = Table B: HLA-DRB1*01:02L HLA-DPA1*01:03-B1*03:01L HLA-DPA1*02:01-B1*13:01L HLA-DRB1*15:03L
  source 1..13: note = Severe acute respiratory syndrome coronavirus 2
ATNYDLSVVNARL

SEQ ID NO: 19765 - protein, 12 aa, Severe acute respiratory syndrome-related coronavirus
  REGION 1..12: note = Table B: HLA-DRB1*01:02L HLA-DPA1*03:01-B1*105:01L HLA-DRB1*04:08L
  source 1..12: note = Severe acute respiratory syndrome coronavirus 2
NYDLSVVNARLR

SEQ ID NO: 19766 - protein, 12 aa, Severe acute respiratory syndrome-related coronavirus
  REGION 1..12: note = Table B: HLA-DRB1*01:02L HLA-DRB1*15:03L
  source 1..12: note = Severe acute respiratory syndrome coronavirus 2
YDLSVVNARLRA

SEQ ID NO: 19767 - protein, 12 aa, Severe acute respiratory syndrome-related coronavirus
  REGION 1..12: note = Table B: HLA-DRB1*01:02L HLA-DRB1*16:01L HLA-DRB1*04:08L HLA-DRB1*15:03L
  source 1..12: note = Severe acute respiratory syndrome coronavirus 2
DLSVVNARLRAK

SEQ ID NO: 19768 - protein, 12 aa, Severe acute respiratory syndrome-related coronavirus
  REGION 1..12: note = Table B: HLA-DRB1*01:02L HLA-DRB1*16:01L
  source 1..12: note = Severe acute respiratory syndrome coronavirus 2
LSVVNARLRAKH

SEQ ID NO: 19769 - protein, 12 aa, Severe acute respiratory syndrome-related coronavirus
  REGION 1..12: note = Table B: HLA-DRB1*01:02L HLA-DRB1*16:01L
  source 1..12: note = Severe acute respiratory syndrome coronavirus 2
SVVNARLRAKHY

SEQ ID NO: 19770 - protein, 13 aa, Severe acute respiratory syndrome-related coronavirus
  REGION 1..13: note = Table B: HLA-DRB1*01:02L HLA-DPA1*03:01-B1*04:02L HLA-DRB1*08:01L HLA-DRB1*12:01L
  source 1..13: note = Severe acute respiratory syndrome coronavirus 2
NARLRAKHYVYIG

SEQ ID NO: 19771 - protein, 14 aa, Severe acute respiratory syndrome-related coronavirus
  REGION 1..14: note = Table B: HLA-DRB1*01:02L HLA-DPA1*03:01-B1*04:02L HLA-DRB1*08:01L HLA-DRB1*12:01L HLA-DPA1*03:01-B1*105:01L
  source 1..14: note = Severe acute respiratory syndrome coronavirus 2
ARLRAKHYVYIGDP

SEQ ID NO: 19772 - protein, 12 aa, Severe acute respiratory syndrome-related coronavirus
  REGION 1..12: note = Table B: HLA-DRB1*01:02L HLA-DPA1*01:03-B1*03:01L HLA-DPA1*03:01-B1*105:01L
  source 1..12: note = Severe acute respiratory syndrome coronavirus 2
IGDPAQLPAPRT

SEQ ID NO: 19773 - protein, 15 aa, Severe acute respiratory syndrome-related coronavirus
  REGION 1..15: note = Table B: HLA-DRB1*01:02L
  source 1..15: note = Severe acute respiratory syndrome coronavirus 2
APRTLLTKGTLEPEY

SEQ ID NO: 19774 - protein, 14 aa, Severe acute respiratory syndrome-related coronavirus
  REGION 1..14: note = Table B: HLA-DRB1*01:02L HLA-DRB3*02:01L
  source 1..14: note = Severe acute respiratory syndrome coronavirus 2
TLLTKGTLEPEYFN

SEQ ID NO: 19775 - protein, 14 aa, Severe acute respiratory syndrome-related coronavirus
  REGION 1..14: note = Table B: HLA-DRB1*01:02L
  source 1..14: note = Severe acute respiratory syndrome coronavirus 2
RLMKTIGPDMFLGT

SEQ ID NO: 19776 - protein, 14 aa, Severe acute respiratory syndrome-related coronavirus
  REGION 1..14: note = Table B: HLA-DRB1*01:02L
  source 1..14: note = Severe acute respiratory syndrome coronavirus 2
LGTCRRCPAEIVDT

SEQ ID NO: 19777 - protein, 11 aa, Severe acute respiratory syndrome-related coronavirus
  REGION 1..11: note = Table B: HLA-DRB1*01:02L
  source 1..11: note = Severe acute respiratory syndrome coronavirus 2
VYDNKLKAHKD

SEQ ID NO: 19778 - protein, 14 aa, Severe acute respiratory syndrome-related coronavirus
  REGION 1..14: note = Table B: HLA-DRB1*01:02L
  source 1..14: note = Severe acute respiratory syndrome coronavirus 2
KLKAHKDKSAQCFK

SEQ ID NO: 19779 - protein, 15 aa, Severe acute respiratory syndrome-related coronavirus
  REGION 1..15: note = Table B: HLA-DRB1*01:02L HLA-DQA1*02:01-B1*03:03L
  source 1..15: note = Severe acute respiratory syndrome coronavirus 2
AHKDKSAQCFKMFYK

SEQ ID NO: 19780 - protein, 12 aa, Severe acute respiratory syndrome-related coronavirus
  REGION 1..12: note = Table B: HLA-DRB1*01:02L
  source 1..12: note = Severe acute respiratory syndrome coronavirus 2
AINRPQIGVVRE

SEQ ID NO: 19781 - protein, 12 aa, Severe acute respiratory syndrome-related coronavirus
  REGION 1..12: note = Table B: HLA-DRB1*01:02L HLA-DRB1*16:01L HLA-DRB1*15:03L
  source 1..12: note = Severe acute respiratory syndrome coronavirus 2
PQIGVVREFLTR

SEQ ID NO: 19782 - protein, 11 aa, Severe acute respiratory syndrome-related coronavirus
  REGION 1..11: note = Table B: HLA-DRB1*01:02L
  source 1..11: note = Severe acute respiratory syndrome coronavirus 2
FLTRNPAWRKA

SEQ ID NO: 19783 - protein, 14 aa, Severe acute respiratory syndrome-related coronavirus
  REGION 1..14: note = Table B: HLA-DRB1*01:02L HLA-DRB1*08:04L HLA-DRB3*02:01L HLA-DRB1*14:01L HLA-DRB1*04:10L HLA-DRB1*12:02L HLA-DPA1*02:01-B1*13:01L HLA-DRB1*14:54L HLA-DQA1*01:03-B1*06:01L HLA-DRB1*04:08L
  source 1..14: note = Severe acute respiratory syndrome coronavirus 2
LPTQTVDSSQGSEY

SEQ ID NO: 19784 - protein, 15 aa, Severe acute respiratory syndrome-related coronavirus
  REGION 1..15: note = Table B: HLA-DRB1*01:02L
  source 1..15: note = Severe acute respiratory syndrome coronavirus 2
AHSCNVNRFNVAITR

SEQ ID NO: 19785 - protein, 14 aa, Severe acute respiratory syndrome-related coronavirus
  REGION 1..14: note = Table B: HLA-DRB1*01:02L HLA-DPA1*01:03-B1*03:01L HLA-DRB1*12:01L HLA-DPA1*02:01-B1*13:01L HLA-DPA1*03:01-B1*105:01L HLA-DQA1*03:01-B1*03:02L HLA-DRB1*16:01L HLA-DRB1*04:08L HLA-DRB1*15:03L
  source 1..14: note = Severe acute respiratory syndrome coronavirus 2
AKVGILCIMSDRDL

SEQ ID NO: 19786 - protein, 13 aa, Severe acute respiratory syndrome-related coronavirus
  REGION 1..13: note = Table B: HLA-DRB1*01:02L
  source 1..13: note = Severe acute respiratory syndrome coronavirus 2
ILCIMSDRDLYDK

SEQ ID NO: 19787 - protein, 11 aa, Severe acute respiratory syndrome-related coronavirus
  REGION 1..11: note = Table B: HLA-DRB1*01:02L HLA-DPA1*01:03-B1*04:02L HLA-DRB1*12:01L HLA-DRB1*10:01L HLA-DQA1*01:03-B1*06:01L HLA-DRB1*08:03L
  source 1..11: note = Severe acute respiratory syndrome coronavirus 2
ATLQAENVTGL

SEQ ID NO: 19788 - protein, 14 aa, Severe acute respiratory syndrome-related coronavirus
  REGION 1..14: note = Table B: HLA-DRB1*01:02L HLA-DRB1*08:01L
  source 1..14: note = Severe acute respiratory syndrome coronavirus 2
QAENVTGLFKDCSK

SEQ ID NO: 19789 - protein, 14 aa, Severe acute respiratory syndrome-related coronavirus
  REGION 1..14: note = Table B: HLA-DRB1*01:02L
  source 1..14: note = Severe acute respiratory syndrome coronavirus 2
GLHPTQAPTHLSVD

SEQ ID NO: 19790 - protein, 10 aa, Severe acute respiratory syndrome-related coronavirus
  REGION 1..10: note = Table B: HLA-DRB1*01:02L HLA-DRB1*12:01L HLA-DRB1*15:03L
  source 1..10: note = Severe acute respiratory syndrome coronavirus 2
LISMMGFKMN

SEQ ID NO: 19791 - protein, 12 aa, Severe acute respiratory syndrome-related coronavirus
  REGION 1..12: note = Table B: HLA-DRB1*01:02L HLA-DRB1*12:01L HLA-DRB1*16:01L HLA-DQA1*01:03-B1*06:01L HLA-DQA1*02:01-B1*03:03L HLA-DRB1*15:03L
  source 1..12: note = Severe acute respiratory syndrome coronavirus 2
AIRHVRAWIGFD

SEQ ID NO: 19792 - protein, 13 aa, Severe acute respiratory syndrome-related coronavirus
  REGION 1..13: note = Table B: HLA-DRB1*01:02L HLA-DPA1*03:01-B1*04:02L HLA-DPA1*01:03-B1*04:02L HLA-DPA1*03:01-B1*105:01L HLA-DPA1*01:02-B1*04:01L HLA-DRB1*16:01L HLA-DRB1*04:08L
  source 1..13: note = Severe acute respiratory syndrome coronavirus 2
VRAWIGFDVEGCH

SEQ ID NO: 19793 - protein, 14 aa, Severe acute respiratory syndrome-related coronavirus
  REGION 1..14: note = Table B: HLA-DRB1*01:02L HLA-DRB1*04:08L HLA-DRB1*15:03L
  source 1..14: note = Severe acute respiratory syndrome coronavirus 2
AWIGFDVEGCHATR

SEQ ID NO: 19794 - protein, 13 aa, Severe acute respiratory syndrome-related coronavirus
  REGION 1..13: note = Table B: HLA-DRB1*01:02L HLA-DRB1*04:08L
  source 1..13: note = Severe acute respiratory syndrome coronavirus 2
GFDVEGCHATREA

SEQ ID NO: 19795 - protein, 14 aa, Severe acute respiratory syndrome-related coronavirus
  REGION 1..14: note = Table B: HLA-DRB1*01:02L
  source 1..14: note = Severe acute respiratory syndrome coronavirus 2
HATREAVGTNLPLQ

SEQ ID NO: 19796 - protein, 14 aa, Severe acute respiratory syndrome-related coronavirus
  REGION 1..14: note = Table B: HLA-DRB1*01:02L
  source 1..14: note = Severe acute respiratory syndrome coronavirus 2
EAVGTNLPLQLGFS

SEQ ID NO: 19797 - protein, 14 aa, Severe acute respiratory syndrome-related coronavirus
  REGION 1..14: note = Table B: HLA-DRB1*01:02L HLA-DPA1*01:03-B1*03:01L
  source 1..14: note = Severe acute respiratory syndrome coronavirus 2
TNLPLQLGFSTGVN

SEQ ID NO: 19798 - protein, 14 aa, Severe acute respiratory syndrome-related coronavirus
  REGION 1..14: note = Table B: HLA-DRB1*01:02L HLA-DRB1*04:08L
  source 1..14: note = Severe acute respiratory syndrome coronavirus 2
LGFSTGVNLVAVPT

SEQ ID NO: 19799 - protein, 12 aa, Severe acute respiratory syndrome-related coronavirus
  REGION 1..12: note = Table B: HLA-DRB1*01:02L HLA-DQA1*01:01-B1*05:01L HLA-DRB1*08:03L
  source 1..12: note = Severe acute respiratory syndrome coronavirus 2
YVDTPNNTDFSR

SEQ ID NO: 19800 - protein, 13 aa, Severe acute respiratory syndrome-related coronavirus
  REGION 1..13: note = Table B: HLA-DRB1*01:02L HLA-DRB1*08:04L HLA-DRB1*04:10L HLA-DRB1*12:01L HLA-DPA1*02:01-B1*13:01L HLA-DRB1*04:08L
  source 1..13: note = Severe acute respiratory syndrome coronavirus 2
FSRVSAKPPPGDQ

SEQ ID NO: 19801 - protein, 14 aa, Severe acute respiratory syndrome-related coronavirus
  REGION 1..14: note = Table B: HLA-DRB1*01:02L
  source 1..14: note = Severe acute respiratory syndrome coronavirus 2
SRVSAKPPPGDQFK

SEQ ID NO: 19802 - protein, 16 aa, Severe acute respiratory syndrome-related coronavirus
  REGION 1..16: note = Table B: HLA-DRB1*01:02L
  source 1..16: note = Severe acute respiratory syndrome coronavirus 2
KPPPGDQFKHLIPLMY

SEQ ID NO: 19803 - protein, 11 aa, Severe acute respiratory syndrome-related coronavirus
  REGION 1..11: note = Table B: HLA-DRB1*01:02L HLA-DRB1*12:01L
  source 1..11: note = Severe acute respiratory syndrome coronavirus 2
QFKHLIPLMYK

SEQ ID NO: 19804 - protein, 12 aa, Severe acute respiratory syndrome-related coronavirus
  REGION 1..12: note = Table B: HLA-DRB1*01:02L HLA-DPA1*03:01-B1*04:02L HLA-DPA1*03:01-B1*105:01L
  source 1..12: note = Severe acute respiratory syndrome coronavirus 2
LIPLMYKGLPWN

SEQ ID NO: 19805 - protein, 13 aa, Severe acute respiratory syndrome-related coronavirus
  REGION 1..13: note = Table B: HLA-DRB1*01:02L
  source 1..13: note = Severe acute respiratory syndrome coronavirus 2
LSDTLKNLSDRVV

SEQ ID NO: 19806 - protein, 12 aa, Severe acute respiratory syndrome-related coronavirus
  REGION 1..12: note = Table B: HLA-DRB1*01:02L
  source 1..12: note = Severe acute respiratory syndrome coronavirus 2
AHGFELTSMKYF

SEQ ID NO: 19807 - protein, 15 aa, Severe acute respiratory syndrome-related coronavirus
  REGION 1..15: note = Table B: HLA-DRB1*01:02L
  source 1..15: note = Severe acute respiratory syndrome coronavirus 2
VKIGPERTCCLCDRR

SEQ ID NO: 19808 - protein, 14 aa, Severe acute respiratory syndrome-related coronavirus
  REGION 1..14: note = Table B: HLA-DRB1*01:02L HLA-DPA1*02:01-B1*13:01L HLA-DQA1*05:05-B1*03:01L
  source 1..14: note = Severe acute respiratory syndrome coronavirus 2
DRRATCFSTASDTY

SEQ ID NO: 19809 - protein, 14 aa, Severe acute respiratory syndrome-related coronavirus
  REGION 1..14: note = Table B: HLA-DRB1*01:02L
  source 1..14: note = Severe acute respiratory syndrome coronavirus 2
WHHSIGFDYVYNPF

SEQ ID NO: 19810 - protein, 12 aa, Severe acute respiratory syndrome-related coronavirus
  REGION 1..12: note = Table B: HLA-DRB1*01:02L HLA-DQA1*05:05-B1*03:19L HLA-DRB1*04:10L HLA-DQA1*05:05-B1*03:01L
  source 1..12: note = Severe acute respiratory syndrome coronavirus 2
YNPFMIDVQQWG

SEQ ID NO: 19811 - protein, 14 aa, Severe acute respiratory syndrome-related coronavirus
  REGION 1..14: note = Table B: HLA-DRB1*01:02L HLA-DPA1*03:01-B1*105:01L
  source 1..14: note = Severe acute respiratory syndrome coronavirus 2
HDLYCQVHGNAHVA

SEQ ID NO: 19812 - protein, 14 aa, Severe acute respiratory syndrome-related coronavirus
  REGION 1..14: note = Table B: HLA-DRB1*01:02L
  source 1..14: note = Severe acute respiratory syndrome coronavirus 2
DLYCQVHGNAHVAS

SEQ ID NO: 19813 - protein, 14 aa, Severe acute respiratory syndrome-related coronavirus
  REGION 1..14: note = Table B: HLA-DRB1*01:02L HLA-DRB1*08:01L HLA-DPA1*03:01-B1*105:01L
  source 1..14: note = Severe acute respiratory syndrome coronavirus 2
LAVHECFVKRVDWT

SEQ ID NO: 19814 - protein, 12 aa, Severe acute respiratory syndrome-related coronavirus
  REGION 1..12: note = Table B: HLA-DRB1*01:02L
  source 1..12: note = Severe acute respiratory syndrome coronavirus 2
TIEYPIIGDELK

SEQ ID NO: 19815 - protein, 13 aa, Severe acute respiratory syndrome-related coronavirus
  REGION 1..13: note = Table B: HLA-DRB1*01:02L HLA-DPA1*01:03-B1*03:01L
  source 1..13: note = Severe acute respiratory syndrome coronavirus 2
IEYPIIGDELKIN

SEQ ID NO: 19816 - protein, 13 aa, Severe acute respiratory syndrome-related coronavirus
  REGION 1..13: note = Table B: HLA-DRB1*01:02L
  source 1..13: note = Severe acute respiratory syndrome coronavirus 2
IGDELKINAACRK

SEQ ID NO: 19817 - protein, 12 aa, Severe acute respiratory syndrome-related coronavirus
  REGION 1..12: note = Table B: HLA-DRB1*01:02L HLA-DRB1*14:01L HLA-DRB1*12:01L HLA-DRB1*16:01L HLA-DRB1*15:03L
  source 1..12: note = Severe acute respiratory syndrome coronavirus 2
ELKINAACRKVQ

SEQ ID NO: 19818 - protein, 14 aa, Severe acute respiratory syndrome-related coronavirus
  REGION 1..14: note = Table B: HLA-DRB1*01:02L
  source 1..14: note = Severe acute respiratory syndrome coronavirus 2
RKVQHMVVKAALLA

SEQ ID NO: 19819 - protein, 14 aa, Severe acute respiratory syndrome-related coronavirus
  REGION 1..14: note = Table B: HLA-DRB1*01:02L HLA-DPA1*02:01-B1*13:01L
  source 1..14: note = Severe acute respiratory syndrome coronavirus 2
KVQHMVVKAALLAD

SEQ ID NO: 19820 - protein, 12 aa, Severe acute respiratory syndrome-related coronavirus
  REGION 1..12: note = Table B: HLA-DRB1*01:02L HLA-DRB1*08:01L
  source 1..12: note = Severe acute respiratory syndrome coronavirus 2
HMVVKAALLADK

SEQ ID NO: 19821 - protein, 12 aa, Severe acute respiratory syndrome-related coronavirus
  REGION 1..12: note = Table B: HLA-DRB1*01:02L HLA-DRB1*12:01L
  source 1..12: note = Severe acute respiratory syndrome coronavirus 2
ALLADKFPVLHD

SEQ ID NO: 19822 - protein, 13 aa, Severe acute respiratory syndrome-related coronavirus
  REGION 1..13: note = Table B: HLA-DRB1*01:02L
  source 1..13: note = Severe acute respiratory syndrome coronavirus 2
DKFPVLHDIGNPK

SEQ ID NO: 19823 - protein, 12 aa, Severe acute respiratory syndrome-related coronavirus
  REGION 1..12: note = Table B: HLA-DRB1*01:02L HLA-DRB1*04:08L
  source 1..12: note = Severe acute respiratory syndrome coronavirus 2
PVLHDIGNPKAI

SEQ ID NO: 19824 - protein, 13 aa, Severe acute respiratory syndrome-related coronavirus
  REGION 1..13: note = Table B: HLA-DRB1*01:02L
  source 1..13: note = Severe acute respiratory syndrome coronavirus 2
GNPKAIKCVPQAD

SEQ ID NO: 19825 - protein, 14 aa, Severe acute respiratory syndrome-related coronavirus
  REGION 1..14: note = Table B: HLA-DRB1*01:02L HLA-DPA1*02:01-B1*13:01L HLA-DRB1*15:03L
  source 1..14: note = Severe acute respiratory syndrome coronavirus 2
KAIKCVPQADVEWK

SEQ ID NO: 19826 - protein, 12 aa, Severe acute respiratory syndrome-related coronavirus
  REGION 1..12: note = Table B: HLA-DRB1*01:02L HLA-DQA1*01-B1*05L HLA-DRB1*16:01L HLA-DRB1*15:03L
  source 1..12: note = Severe acute respiratory syndrome coronavirus 2
VEWKFYDAQPCS

SEQ ID NO: 19827 - protein, 11 aa, Severe acute respiratory syndrome-related coronavirus
  REGION 1..11: note = Table B: HLA-DRB1*01:02L HLA-DQA1*01-B1*05L HLA-DRB1*16:01L HLA-DRB1*15:03L
  source 1..11: note = Severe acute respiratory syndrome coronavirus 2
WKFYDAQPCSD

SEQ ID NO: 19828 - protein, 11 aa, Severe acute respiratory syndrome-related coronavirus
  REGION 1..11: note = Table B: HLA-DRB1*01:02L HLA-DRB1*08:01L HLA-DRB1*12:01L HLA-DPA1*01:02-B1*04:01L
  source 1..11: note = Severe acute respiratory syndrome coronavirus 2
KFYDAQPCSDK

SEQ ID NO: 19829 - protein, 14 aa, Severe acute respiratory syndrome-related coronavirus
  REGION 1..14: note = Table B: HLA-DRB1*01:02L
  source 1..14: note = Severe acute respiratory syndrome coronavirus 2
YDAQPCSDKAYKIE

SEQ ID NO: 19830 - protein, 13 aa, Severe acute respiratory syndrome-related coronavirus
  REGION 1..13: note = Table B: HLA-DRB1*01:02L HLA-DRB1*08:04L HLA-DRB1*04:08L
  source 1..13: note = Severe acute respiratory syndrome coronavirus 2
KAYKIEELFYSYA

SEQ ID NO: 19831 - protein, 13 aa, Severe acute respiratory syndrome-related coronavirus
  REGION 1..13: note = Table B: HLA-DRB1*01:02L HLA-DRB1*08:04L HLA-DRB1*14:01L HLA-DQA1*05:01-B1*02:01L HLA-DQA1*03:01-B1*03:02L
  source 1..13: note = Severe acute respiratory syndrome coronavirus 2
LFWNCNVDRYPAN

SEQ ID NO: 19832 - protein, 14 aa, Severe acute respiratory syndrome-related coronavirus
  REGION 1..14: note = Table B: HLA-DRB1*01:02L
  source 1..14: note = Severe acute respiratory syndrome coronavirus 2
RYPANSIVCRFDTR

SEQ ID NO: 19833 - protein, 15 aa, Severe acute respiratory syndrome-related coronavirus
  REGION 1..15: note = Table B: HLA-DRB1*01:02L HLA-DRB1*14:01L HLA-DRB1*12:01L HLA-DRB1*16:01L
  source 1..15: note = Severe acute respiratory syndrome coronavirus 2
YPANSIVCRFDTRVL

SEQ ID NO: 19834 - protein, 12 aa, Severe acute respiratory syndrome-related coronavirus
  REGION 1..12: note = Table B: HLA-DRB1*01:02L HLA-DRB1*12:01L HLA-DPA1*02:01-B1*13:01L
  source 1..12: note = Severe acute respiratory syndrome coronavirus 2
IVCRFDTRVLSN

SEQ ID NO: 19835 - protein, 12 aa, Severe acute respiratory syndrome-related coronavirus
  REGION 1..12: note = Table B: HLA-DRB1*01:02L HLA-DRB1*16:01L
  source 1..12: note = Severe acute respiratory syndrome coronavirus 2
KHAFHTPAFDKS

SEQ ID NO: 19836 - protein, 12 aa, Severe acute respiratory syndrome-related coronavirus
  REGION 1..12: note = Table B: HLA-DRB1*01:02L HLA-DRB1*08:01L HLA-DRB1*12:01L HLA-DPA1*01:03-B1*02:01L
  source 1..12: note = Severe acute respiratory syndrome coronavirus 2
AFDKSAFVNLKQ

SEQ ID NO: 19837 - protein, 13 aa, Severe acute respiratory syndrome-related coronavirus
  REGION 1..13: note = Table B: HLA-DRB1*01:02L
  source 1..13: note = Severe acute respiratory syndrome coronavirus 2
VNLKQLPFFYYSD

SEQ ID NO: 19838 - protein, 14 aa, Severe acute respiratory syndrome-related coronavirus
  REGION 1..14: note = Table B: HLA-DRB1*01:02L
  source 1..14: note = Severe acute respiratory syndrome coronavirus 2
KQLPFFYYSDSPCE

SEQ ID NO: 19839 - protein, 16 aa, Severe acute respiratory syndrome-related coronavirus
  REGION 1..16: note = Table B: HLA-DRB1*01:02L
  source 1..16: note = Severe acute respiratory syndrome coronavirus 2
DSPCESHGKQVVSDID

SEQ ID NO: 19840 - protein, 11 aa, Severe acute respiratory syndrome-related coronavirus
  REGION 1..11: note = Table B: HLA-DRB1*01:02L HLA-DRB1*12:01L HLA-DRB1*16:01L HLA-DRB1*15:03L
  source 1..11: note = Severe acute respiratory syndrome coronavirus 2
IDYVPLKSATC

SEQ ID NO: 19841 - protein, 12 aa, Severe acute respiratory syndrome-related coronavirus
  REGION 1..12: note = Table B: HLA-DRB1*01:02L HLA-DPA1*02:01-B1*13:01L HLA-DPA1*03:01-B1*105:01L HLA-DRB1*04:08L
  source 1..12: note = Severe acute respiratory syndrome coronavirus 2
NEYRLYLDAYNM

SEQ ID NO: 19842 - protein, 12 aa, Severe acute respiratory syndrome-related coronavirus
  REGION 1..12: note = Table B: HLA-DRB1*01:02L HLA-DPA1*01:03-B1*04:02L
  source 1..12: note = Severe acute respiratory syndrome coronavirus 2
EYRLYLDAYNMM

SEQ ID NO: 19843 - protein, 14 aa, Severe acute respiratory syndrome-related coronavirus
  REGION 1..14: note = Table B: HLA-DRB1*01:02L HLA-DPA1*01:03-B1*03:01L HLA-DQA1*01-B1*05L HLA-DQA1*05:01-B1*02:01L HLA-DPA1*01:03-B1*04:01L HLA-DPA1*01:03-B1*04:02L HLA-DRB1*12:01L HLA-DRB1*16:01L
  source 1..14: note = Severe acute respiratory syndrome coronavirus 2
ISAGFSLWVYKQFD

SEQ ID NO: 19844 - protein, 12 aa, Severe acute respiratory syndrome-related coronavirus
  REGION 1..12: note = Table B: HLA-DRB1*01:02L HLA-DRB1*08:04L HLA-DRB1*08:01L HLA-DRB1*14:54L HLA-DQA1*05:05-B1*03:01L
  source 1..12: note = Severe acute respiratory syndrome coronavirus 2
NVAFNVVNKGHF

SEQ ID NO: 19845 - protein, 13 aa, Severe acute respiratory syndrome-related coronavirus
  REGION 1..13: note = Table B: HLA-DRB1*01:02L HLA-DPA1*03:01-B1*105:01L HLA-DRB1*15:03L
  source 1..13: note = Severe acute respiratory syndrome coronavirus 2
FNVVNKGHFDGQQ

SEQ ID NO: 19846 - protein, 16 aa, Severe acute respiratory syndrome-related coronavirus
  REGION 1..16: note = Table B: HLA-DRB1*01:02L HLA-DPA1*02:01-B1*13:01L
  source 1..16: note = Severe acute respiratory syndrome coronavirus 2
NVVNKGHFDGQQGEVP

SEQ ID NO: 19847 - protein, 14 aa, Severe acute respiratory syndrome-related coronavirus
  REGION 1..14: note = Table B: HLA-DRB1*01:02L HLA-DRB1*12:01L
  source 1..14: note = Severe acute respiratory syndrome coronavirus 2
TKVDGVDVELFENK

SEQ ID NO: 19848 - protein, 14 aa, Severe acute respiratory syndrome-related coronavirus
  REGION 1..14: note = Table B: HLA-DRB1*01:02L HLA-DRB1*08:04L HLA-DRB1*08:01L HLA-DRB1*04:10L HLA-DPA1*02:01-B1*13:01L HLA-DPA1*01:03-B1*02:01L
  source 1..14: note = Severe acute respiratory syndrome coronavirus 2
VDGVDVELFENKTT

SEQ ID NO: 19849 - protein, 13 aa, Severe acute respiratory syndrome-related coronavirus
  REGION 1..13: note = Table B: HLA-DRB1*01:02L HLA-DQA1*01:01-B1*05:01L
  source 1..13: note = Severe acute respiratory syndrome coronavirus 2
ENKTTLPVNVAFE

SEQ ID NO: 19850 - protein, 13 aa, Severe acute respiratory syndrome-related coronavirus
  REGION 1..13: note = Table B: HLA-DRB1*01:02L HLA-DQA1*03:01-B1*03:02L HLA-DPA1*01:02-B1*04:01L HLA-DRB1*04:08L HLA-DQA1*02:01-B1*03:03L
  source 1..13: note = Severe acute respiratory syndrome coronavirus 2
LPVNVAFELWAKR

SEQ ID NO: 19851 - protein, 11 aa, Severe acute respiratory syndrome-related coronavirus
  REGION 1..11: note = Table B: HLA-DRB1*01:02L HLA-DQA1*05:01-B1*02:01L HLA-DRB1*12:01L
  source 1..11: note = Severe acute respiratory syndrome coronavirus 2
NIKPVPEVKIL

SEQ ID NO: 19852 - protein, 14 aa, Severe acute respiratory syndrome-related coronavirus
  REGION 1..14: note = Table B: HLA-DRB1*01:02L HLA-DPA1*03:01-B1*105:01L HLA-DQA1*01:03-B1*06:01L
  source 1..14: note = Severe acute respiratory syndrome coronavirus 2
NLGVDIAANTVIWD

SEQ ID NO: 19853 - protein, 14 aa, Severe acute respiratory syndrome-related coronavirus
  REGION 1..14: note = Table B: HLA-DRB1*01:02L
  source 1..14: note = Severe acute respiratory syndrome coronavirus 2
AANTVIWDYKRDAP

SEQ ID NO: 19854 - protein, 14 aa, Severe acute respiratory syndrome-related coronavirus
  REGION 1..14: note = Table B: HLA-DRB1*01:02L
  source 1..14: note = Severe acute respiratory syndrome coronavirus 2
TIGVCSMTDIAKKP

SEQ ID NO: 19855 - protein, 14 aa, Severe acute respiratory syndrome-related coronavirus
  REGION 1..14: note = Table B: HLA-DRB1*01:02L
  source 1..14: note = Severe acute respiratory syndrome coronavirus 2
GRVDGQVDLFRNAR

SEQ ID NO: 19856 - protein, 12 aa, Severe acute respiratory syndrome-related coronavirus
  REGION 1..12: note = Table B: HLA-DRB1*01:02L
  source 1..12: note = Severe acute respiratory syndrome coronavirus 2
LFRNARNGVLIT

SEQ ID NO: 19857 - protein, 14 aa, Severe acute respiratory syndrome-related coronavirus
  REGION 1..14: note = Table B: HLA-DRB1*01:02L HLA-DPA1*01:03-B1*03:01L HLA-DPA1*02:01-B1*13:01L
  source 1..14: note = Severe acute respiratory syndrome coronavirus 2
RNARNGVLITEGSV

SEQ ID NO: 19858 - protein, 12 aa, Severe acute respiratory syndrome-related coronavirus
  REGION 1..12: note = Table B: HLA-DRB1*01:02L HLA-DRB1*04:08L
  source 1..12: note = Severe acute respiratory syndrome coronavirus 2
VLITEGSVKGLQ

SEQ ID NO: 19859 - protein, 12 aa, Severe acute respiratory syndrome-related coronavirus
  REGION 1..12: note = Table B: HLA-DRB1*01:02L HLA-DQA1*01:01-B1*05:01L HLA-DQA1*05:05-B1*03:19L HLA-DQA1*05:01-B1*02:01L HLA-DRB1*12:01L HLA-DPA1*03:01-B1*105:01L HLA-DRB1*14:17L
  source 1..12: note = Severe acute respiratory syndrome coronavirus 2
LNGVTLIGEAVK

SEQ ID NO: 19860 - protein, 12 aa, Severe acute respiratory syndrome-related coronavirus
  REGION 1..12: note = Table B: HLA-DRB1*01:02L HLA-DRB1*04:08L
  source 1..12: note = Severe acute respiratory syndrome coronavirus 2
EAVKTQFNYYKK

SEQ ID NO: 19861 - protein, 12 aa, Severe acute respiratory syndrome-related coronavirus
  REGION 1..12: note = Table B: HLA-DRB1*01:02L
  source 1..12: note = Severe acute respiratory syndrome coronavirus 2
KTQFNYYKKVDG

SEQ ID NO: 19862 - protein, 14 aa, Severe acute respiratory syndrome-related coronavirus
  REGION 1..14: note = Table B: HLA-DRB1*01:02L HLA-DRB1*11:04L HLA-DRB1*11:01L HLA-DRB1*12:01L
  source 1..14: note = Severe acute respiratory syndrome coronavirus 2
TYFTQSRNLQEFKP

SEQ ID NO: 19863 - protein, 14 aa, Severe acute respiratory syndrome-related coronavirus
  REGION 1..14: note = Table B: HLA-DRB1*01:02L HLA-DQA1*05:01-B1*02:01L HLA-DPA1*01:03-B1*04:02L HLA-DRB1*12:01L HLA-DPA1*02:01-B1*13:01L HLA-DRB1*16:01L HLA-DQA1*01:03-B1*06:01L
  source 1..14: note = Severe acute respiratory syndrome coronavirus 2
KPRSQMEIDFLELA

SEQ ID NO: 19864 - protein, 11 aa, Severe acute respiratory syndrome-related coronavirus
  REGION 1..11: note = Table B: HLA-DRB1*01:02L
  source 1..11: note = Severe acute respiratory syndrome coronavirus 2
LAMDEFIERYK

SEQ ID NO: 19865 - protein, 13 aa, Severe acute respiratory syndrome-related coronavirus
  REGION 1..13: note = Table B: HLA-DRB1*01:02L HLA-DRB1*08:01L HLA-DRB1*12:01L
  source 1..13: note = Severe acute respiratory syndrome coronavirus 2
KLEGYAFEHIVYG

SEQ ID NO: 19866 - protein, 12 aa, Severe acute respiratory syndrome-related coronavirus
  REGION 1..12: note = Table B: HLA-DRB1*01:02L HLA-DRB1*04:08L
  source 1..12: note = Severe acute respiratory syndrome coronavirus 2
GYAFEHIVYGDF

SEQ ID NO: 19867 - protein, 13 aa, Severe acute respiratory syndrome-related coronavirus
  REGION 1..13: note = Table B: HLA-DRB1*01:02L HLA-DRB1*08:01L
  source 1..13: note = Severe acute respiratory syndrome coronavirus 2
YAFEHIVYGDFSH

SEQ ID NO: 19868 - protein, 12 aa, Severe acute respiratory syndrome-related coronavirus
  REGION 1..12: note = Table B: HLA-DRB1*01:02L HLA-DRB1*12:01L HLA-DRB1*15:03L
  source 1..12: note = Severe acute respiratory syndrome coronavirus 2
GLHLLIGLAKRF

SEQ ID NO: 19869 - protein, 12 aa, Severe acute respiratory syndrome-related coronavirus
  REGION 1..12: note = Table B: HLA-DRB1*01:02L HLA-DRB1*15:03L
  source 1..12: note = Severe acute respiratory syndrome coronavirus 2
LHLLIGLAKRFK

SEQ ID NO: 19870 - protein, 14 aa, Severe acute respiratory syndrome-related coronavirus
  REGION 1..14: note = Table B: HLA-DRB1*01:02L HLA-DRB1*08:01L HLA-DRB1*16:01L HLA-DRB1*15:03L
  source 1..14: note = Severe acute respiratory syndrome coronavirus 2
HLLIGLAKRFKESP

SEQ ID NO: 19871 - protein, 12 aa, Severe acute respiratory syndrome-related coronavirus
  REGION 1..12: note = Table B: HLA-DRB1*01:02L HLA-DRB1*12:01L HLA-DRB1*15:03L
  source 1..12: note = Severe acute respiratory syndrome coronavirus 2
GLAKRFKESPFE

SEQ ID NO: 19872 - protein, 12 aa, Severe acute respiratory syndrome-related coronavirus
  REGION 1..12: note = Table B: HLA-DRB1*01:02L HLA-DPA1*01:03-B1*03:01L HLA-DPA1*03:01-B1*04:02L HLA-DPA1*01:03-B1*04:01L HLA-DRB1*04:10L HLA-DRB1*12:01L HLA-DPA1*02:01-B1*13:01L HLA-DRB1*08:03L HLA-DRB1*15:03L
  source 1..12: note = Severe acute respiratory syndrome coronavirus 2
LDDFVEIIKSQD

SEQ ID NO: 19873 - protein, 13 aa, Severe acute respiratory syndrome-related coronavirus
  REGION 1..13: note = Table B: HLA-DRB1*01:02L
  source 1..13: note = Severe acute respiratory syndrome coronavirus 2
QDLSVVSKVVKVT

SEQ ID NO: 19874 - protein, 14 aa, Severe acute respiratory syndrome-related coronavirus
  REGION 1..14: note = Table B: HLA-DRB1*01:02L HLA-DPA1*03:01-B1*105:01L
  source 1..14: note = Severe acute respiratory syndrome coronavirus 2
SVVSKVVKVTIDYT

SEQ ID NO: 19875 - protein, 14 aa, Severe acute respiratory syndrome-related coronavirus
  REGION 1..14: note = Table B: HLA-DRB1*01:02L
  source 1..14: note = Severe acute respiratory syndrome coronavirus 2
KDGHVETFYPKLQS

SEQ ID NO: 19876 - protein, 14 aa, Severe acute respiratory syndrome-related coronavirus
  REGION 1..14: note = Table B: HLA-DRB1*01:02L HLA-DRB1*08:01L HLA-DRB1*12:01L HLA-DRB1*04:08L
  source 1..14: note = Severe acute respiratory syndrome coronavirus 2
DGHVETFYPKLQSS

SEQ ID NO: 19877 - protein, 14 aa, Severe acute respiratory syndrome-related coronavirus
  REGION 1..14: note = Table B: HLA-DRB1*01:02L HLA-DRB1*15:03L
  source 1..14: note = Severe acute respiratory syndrome coronavirus 2
HVETFYPKLQSSQA

SEQ ID NO: 19878 - protein, 14 aa, Severe acute respiratory syndrome-related coronavirus
  REGION 1..14: note = Table B: HLA-DRB1*01:02L
  source 1..14: note = Severe acute respiratory syndrome coronavirus 2
QPGVAMPNLYKMQR

SEQ ID NO: 19879 - protein, 14 aa, Severe acute respiratory syndrome-related coronavirus
  REGION 1..14: note = Table B: HLA-DRB1*01:02L
  source 1..14: note = Severe acute respiratory syndrome coronavirus 2
KMQRMLLEKCDLQN

SEQ ID NO: 19880 - protein, 12 aa, Severe acute respiratory syndrome-related coronavirus
  REGION 1..12: note = Table B: HLA-DRB1*01:02L HLA-DRB3*02:01L HLA-DPA1*01:03-B1*03:01L HLA-DPA1*03:01-B1*04:02L HLA-DPA1*01:03-B1*04:01L HLA-DQA1*05:05-B1*03:116L HLA-DPA1*01:03-B1*04:02L HLA-DPA1*02:01-B1*13:01L
  REGION 1..12: note = CONT. FROM ABOVE: HLA-DRB1*15:03L
  source 1..12: note = Severe acute respiratory syndrome coronavirus 2
YGDSATLPKGIM

SEQ ID NO: 19881 - protein, 15 aa, Severe acute respiratory syndrome-related coronavirus
  REGION 1..15: note = Table B: HLA-DRB1*01:02L
  source 1..15: note = Severe acute respiratory syndrome coronavirus 2
DSATLPKGIMMNVAK

SEQ ID NO: 19882 - protein, 14 aa, Severe acute respiratory syndrome-related coronavirus
  REGION 1..14: note = Table B: HLA-DRB1*01:02L HLA-DPA1*01:03-B1*04:02L HLA-DRB1*15:03L
  source 1..14: note = Severe acute respiratory syndrome coronavirus 2
AKYTQLCQYLNTLT

SEQ ID NO: 19883 - protein, 14 aa, Severe acute respiratory syndrome-related coronavirus
  REGION 1..14: note = Table B: HLA-DRB1*01:02L HLA-DRB1*12:01L HLA-DRB1*16:01L HLA-DRB1*15:03L
  source 1..14: note = Severe acute respiratory syndrome coronavirus 2
TLTLAVPYNMRVIH

SEQ ID NO: 19884 - protein, 14 aa, Severe acute respiratory syndrome-related coronavirus
  REGION 1..14: note = Table B: HLA-DRB1*01:02L HLA-DQA1*05:05-B1*03:116L HLA-DRB1*04:08L
  source 1..14: note = Severe acute respiratory syndrome coronavirus 2
GAGSDKGVAPGTAV

SEQ ID NO: 19885 - protein, 15 aa, Severe acute respiratory syndrome-related coronavirus
  REGION 1..15: note = Table B: HLA-DRB1*01:02L
  source 1..15: note = Severe acute respiratory syndrome coronavirus 2
APGTAVLRQWLPTGT

SEQ ID NO: 19886 - protein, 14 aa, Severe acute respiratory syndrome-related coronavirus
  REGION 1..14: note = Table B: HLA-DRB1*01:02L HLA-DRB1*14:01L HLA-DQA1*05:05-B1*03:19L HLA-DPA1*03:01-B1*105:01L HLA-DRB1*15:03L
  source 1..14: note = Severe acute respiratory syndrome coronavirus 2
DSTLIGDCATVHTA

SEQ ID NO: 19887 - protein, 14 aa, Severe acute respiratory syndrome-related coronavirus
  REGION 1..14: note = Table B: HLA-DRB1*01:02L HLA-DRB1*04:08L
  source 1..14: note = Severe acute respiratory syndrome coronavirus 2
TLIGDCATVHTANK

SEQ ID NO: 19888 - protein, 14 aa, Severe acute respiratory syndrome-related coronavirus
  REGION 1..14: note = Table B: HLA-DRB1*01:02L
  source 1..14: note = Severe acute respiratory syndrome coronavirus 2
IGDCATVHTANKWD

SEQ ID NO: 19889 - protein, 15 aa, Severe acute respiratory syndrome-related coronavirus
  REGION 1..15: note = Table B: HLA-DRB1*01:02L
  source 1..15: note = Severe acute respiratory syndrome coronavirus 2
ATVHTANKWDLIISD

SEQ ID NO: 19890 - protein, 14 aa, Severe acute respiratory syndrome-related coronavirus
  REGION 1..14: note = Table B: HLA-DRB1*01:02L HLA-DRB1*12:01L HLA-DRB1*04:08L HLA-DRB1*15:03L
  source 1..14: note = Severe acute respiratory syndrome coronavirus 2
NKWDLIISDMYDPK

SEQ ID NO: 19891 - protein, 12 aa, Severe acute respiratory syndrome-related coronavirus
  REGION 1..12: note = Table B: HLA-DRB1*01:02L HLA-DRB1*15:03L
  source 1..12: note = Severe acute respiratory syndrome coronavirus 2
FFTYICGFIQQK

SEQ ID NO: 19892 - protein, 13 aa, Severe acute respiratory syndrome-related coronavirus
  REGION 1..13: note = Table B: HLA-DRB1*01:02L HLA-DQA1*05:05-B1*03:01L
  source 1..13: note = Severe acute respiratory syndrome coronavirus 2
FTYICGFIQQKLA

SEQ ID NO: 19893 - protein, 13 aa, Severe acute respiratory syndrome-related coronavirus
  REGION 1..13: note = Table B: HLA-DRB1*01:02L HLA-DPA1*01:03-B1*03:01L HLA-DRB1*12:01L
  source 1..13: note = Severe acute respiratory syndrome coronavirus 2
FIQQKLALGGSVA

SEQ ID NO: 19894 - protein, 13 aa, Severe acute respiratory syndrome-related coronavirus
  REGION 1..13: note = Table B: HLA-DRB1*01:02L HLA-DRB1*08:04L HLA-DRB1*08:01L HLA-DRB1*04:08L
  source 1..13: note = Severe acute respiratory syndrome coronavirus 2
VAIKITEHSWNAD

SEQ ID NO: 19895 - protein, 13 aa, Severe acute respiratory syndrome-related coronavirus
  REGION 1..13: note = Table B: HLA-DRB1*01:02L
  source 1..13: note = Severe acute respiratory syndrome coronavirus 2
IKITEHSWNADLY

SEQ ID NO: 19896 - protein, 14 aa, Severe acute respiratory syndrome-related coronavirus
  REGION 1..14: note = Table B: HLA-DRB1*01:02L
  source 1..14: note = Severe acute respiratory syndrome coronavirus 2
HSWNADLYKLMGHF

SEQ ID NO: 19897 - protein, 12 aa, Severe acute respiratory syndrome-related coronavirus
  REGION 1..12: note = Table B: HLA-DRB1*01:02L HLA-DRB1*14:01L
  source 1..12: note = Severe acute respiratory syndrome coronavirus 2
ADLYKLMGHFAW

SEQ ID NO: 19898 - protein, 13 aa, Severe acute respiratory syndrome-related coronavirus
  REGION 1..13: note = Table B: HLA-DRB1*01:02L
  source 1..13: note = Severe acute respiratory syndrome coronavirus 2
DLYKLMGHFAWWT

SEQ ID NO: 19899 - protein, 14 aa, Severe acute respiratory syndrome-related coronavirus
  REGION 1..14: note = Table B: HLA-DRB1*01:02L HLA-DRB1*15:03L
  source 1..14: note = Severe acute respiratory syndrome coronavirus 2
AWWTAFVTNVNASS

SEQ ID NO: 19900 - protein, 13 aa, Severe acute respiratory syndrome-related coronavirus
  REGION 1..13: note = Table B: HLA-DRB1*01:02L HLA-DPA1*01:03-B1*03:01L
  source 1..13: note = Severe acute respiratory syndrome coronavirus 2
NVNASSSEAFLIG

SEQ ID NO: 19901 - protein, 14 aa, Severe acute respiratory syndrome-related coronavirus
  REGION 1..14: note = Table B: HLA-DRB1*01:02L HLA-DPA1*02:01-B1*13:01L HLA-DRB1*16:01L
  source 1..14: note = Severe acute respiratory syndrome coronavirus 2
KPREQIDGYVMHAN

SEQ ID NO: 19902 - protein, 14 aa, Severe acute respiratory syndrome-related coronavirus
  REGION 1..14: note = Table B: HLA-DRB1*01:02L HLA-DPA1*03:01-B1*04:02L HLA-DPA1*02:01-B1*13:01L HLA-DRB1*16:01L HLA-DRB1*15:03L
  source 1..14: note = Severe acute respiratory syndrome coronavirus 2
PIQLSSYSLFDMSK

SEQ ID NO: 19903 - protein, 13 aa, Severe acute respiratory syndrome-related coronavirus
  REGION 1..13: note = Table B: HLA-DRB1*01:02L HLA-DRB1*12:01L
  source 1..13: note = Severe acute respiratory syndrome coronavirus 2
LSSYSLFDMSKFP

SEQ ID NO: 19904 - protein, 12 aa, Severe acute respiratory syndrome-related coronavirus
  REGION 1..12: note = Table B: HLA-DRB1*01:02L
  source 1..12: note = Severe acute respiratory syndrome coronavirus 2
FDMSKFPLKLRG

SEQ ID NO: 19905 - protein, 12 aa, Severe acute respiratory syndrome-related coronavirus
  REGION 1..12: note = Table B: HLA-DRB1*01:02L
  source 1..12: note = Severe acute respiratory syndrome coronavirus 2
KLRGTAVMSLKE

SEQ ID NO: 19906 - protein, 12 aa, Severe acute respiratory syndrome-related coronavirus
  REGION 1..12: note = Table B: HLA-DRB1*01:02L
  source 1..12: note = Severe acute respiratory syndrome coronavirus 2
LSLLSKGRLIIR

SEQ ID NO: 19907 - protein, 13 aa, Severe acute respiratory syndrome-related coronavirus
  REGION 1..13: note = Table B: HLA-DRB1*01:02L HLA-DRB1*08:01L
  source 1..13: note = Severe acute respiratory syndrome coronavirus 2
LSKGRLIIRENNR

SEQ ID NO: 19908 - protein, 12 aa, Severe acute respiratory syndrome-related coronavirus
  REGION 1..12: note = Table B: HLA-DRB1*01:02L HLA-DRB1*12:01L HLA-DRB1*15:03L
  source 1..12: note = Severe acute respiratory syndrome coronavirus 2
RLIIRENNRVVI

SEQ ID NO: 19909 - protein, 11 aa, Severe acute respiratory syndrome-related coronavirus
  REGION 1..11: note = Table B: HLA-DRB1*01:02L
  source 1..11: note = Severe acute respiratory syndrome coronavirus 2
LLPLVSSQCVN

SEQ ID NO: 19910 - protein, 15 aa, Severe acute respiratory syndrome-related coronavirus
  REGION 1..15: note = Table B: HLA-DRB1*01:02L
  source 1..15: note = Severe acute respiratory syndrome coronavirus 2
RTQLPPAYTNSFTRG

SEQ ID NO: 19911 - protein, 15 aa, Severe acute respiratory syndrome-related coronavirus
  REGION 1..15: note = Table B: HLA-DRB1*01:02L
  source 1..15: note = Severe acute respiratory syndrome coronavirus 2
PAYTNSFTRGVYYPD

SEQ ID NO: 19912 - protein, 12 aa, Severe acute respiratory syndrome-related coronavirus
  REGION 1..12: note = Table B: HLA-DRB1*01:02L HLA-DPA1*03:01-B1*04:02L HLA-DRB1*08:01L HLA-DPA1*01:03-B1*04:02L HLA-DRB1*12:01L HLA-DQA1*03:01-B1*03:02L HLA-DRB1*16:01L HLA-DRB1*15:03L
  source 1..12: note = Severe acute respiratory syndrome coronavirus 2
KVFRSSVLHSTQ

SEQ ID NO: 19913 - protein, 13 aa, Severe acute respiratory syndrome-related coronavirus
  REGION 1..13: note = Table B: HLA-DRB1*01:02L
  source 1..13: note = Severe acute respiratory syndrome coronavirus 2
SVLHSTQDLFLPF

SEQ ID NO: 19914 - protein, 12 aa, Severe acute respiratory syndrome-related coronavirus
  REGION 1..12: note = Table B: HLA-DRB1*01:02L HLA-DRB1*12:01L HLA-DQA1*02:01-B1*03:03L
  source 1..12: note = Severe acute respiratory syndrome coronavirus 2
SNVTWFHAIHVS

SEQ ID NO: 19915 - protein, 12 aa, Severe acute respiratory syndrome-related coronavirus
  REGION 1..12: note = Table B: HLA-DRB1*01:02L HLA-DRB1*04:08L
  source 1..12: note = Severe acute respiratory syndrome coronavirus 2
WFHAIHVSGTNG

SEQ ID NO: 19916 - protein, 16 aa, Severe acute respiratory syndrome-related coronavirus
  REGION 1..16: note = Table B: HLA-DRB1*01:02L HLA-DQA1*01:03-B1*06:01L
  source 1..16: note = Severe acute respiratory syndrome coronavirus 2
IHVSGTNGTKRFDNPV

SEQ ID NO: 19917 - protein, 12 aa, Severe acute respiratory syndrome-related coronavirus
  REGION 1..12: note = Table B: HLA-DRB1*01:02L HLA-DPA1*02:01-B1*13:01L HLA-DRB1*04:08L
  source 1..12: note = Severe acute respiratory syndrome coronavirus 2
RFDNPVLPFNDG

SEQ ID NO: 19918 - protein, 11 aa, Severe acute respiratory syndrome-related coronavirus
  REGION 1..11: note = Table B: HLA-DRB1*01:02L HLA-DQA1*05:05-B1*03:116L
  source 1..11: note = Severe acute respiratory syndrome coronavirus 2
PVLPFNDGVYF

SEQ ID NO: 19919 - protein, 13 aa, Severe acute respiratory syndrome-related coronavirus
  REGION 1..13: note = Table B: HLA-DRB1*01:02L
  source 1..13: note = Severe acute respiratory syndrome coronavirus 2
RGWIFGTTLDSKT

SEQ ID NO: 19920 - protein, 13 aa, Severe acute respiratory syndrome-related coronavirus
  REGION 1..13: note = Table B: HLA-DRB1*01:02L HLA-DPA1*02:01-B1*13:01L HLA-DRB1*04:08L HLA-DQA1*02:01-B1*03:03L
  source 1..13: note = Severe acute respiratory syndrome coronavirus 2
HKNNKSWMESEFR

SEQ ID NO: 19921 - protein, 13 aa, Severe acute respiratory syndrome-related coronavirus
  REGION 1..13: note = Table B: HLA-DRB1*01:02L HLA-DRB1*14:01L HLA-DRB1*08:01L
  source 1..13: note = Severe acute respiratory syndrome coronavirus 2
NNKSWMESEFRVY

SEQ ID NO: 19922 - protein, 13 aa, Severe acute respiratory syndrome-related coronavirus
  REGION 1..13: note = Table B: HLA-DRB1*01:02L HLA-DPA1*01:03-B1*02:01L
  source 1..13: note = Severe acute respiratory syndrome coronavirus 2
NKSWMESEFRVYS

SEQ ID NO: 19923 - protein, 14 aa, Severe acute respiratory syndrome-related coronavirus
  REGION 1..14: note = Table B: HLA-DRB1*01:02L HLA-DRB1*08:04L HLA-DRB1*08:01L HLA-DPA1*01:03-B1*02:01L HLA-DQA1*05:05-B1*03:01L
  source 1..14: note = Severe acute respiratory syndrome coronavirus 2
SWMESEFRVYSSAN

SEQ ID NO: 19924 - protein, 12 aa, Severe acute respiratory syndrome-related coronavirus
  REGION 1..12: note = Table B: HLA-DRB1*01:02L HLA-DPA1*01:03-B1*03:01L
  source 1..12: note = Severe acute respiratory syndrome coronavirus 2
TFEYVSQPFLMD

SEQ ID NO: 19925 - protein, 11 aa, Severe acute respiratory syndrome-related coronavirus
  REGION 1..11: note = Table B: HLA-DRB1*01:02L
  source 1..11: note = Severe acute respiratory syndrome coronavirus 2
NFKNLREFVFK

SEQ ID NO: 19926 - protein, 13 aa, Severe acute respiratory syndrome-related coronavirus
  REGION 1..13: note = Table B: HLA-DRB1*01:02L HLA-DRB1*14:01L
  source 1..13: note = Severe acute respiratory syndrome coronavirus 2
NLREFVFKNIDGY

SEQ ID NO: 19927 - protein, 13 aa, Severe acute respiratory syndrome-related coronavirus
  REGION 1..13: note = Table B: HLA-DRB1*01:02L HLA-DRB1*14:01L HLA-DRB1*11:04L HLA-DRB1*08:01L HLA-DRB3*01:01L
  source 1..13: note = Severe acute respiratory syndrome coronavirus 2
KNIDGYFKIYSKH

SEQ ID NO: 19928 - protein, 12 aa, Severe acute respiratory syndrome-related coronavirus
  REGION 1..12: note = Table B: HLA-DRB1*01:02L HLA-DRB1*08:04L HLA-DRB1*08:77L HLA-DRB3*02:01L HLA-DRB1*03:01L HLA-DRB1*12:02L
  source 1..12: note = Severe acute respiratory syndrome coronavirus 2
INLVRDLPQGFS

SEQ ID NO: 19929 - protein, 11 aa, Severe acute respiratory syndrome-related coronavirus
  REGION 1..11: note = Table B: HLA-DRB1*01:02L
  source 1..11: note = Severe acute respiratory syndrome coronavirus 2
RFQTLLALHRS

SEQ ID NO: 19930 - protein, 12 aa, Severe acute respiratory syndrome-related coronavirus
  REGION 1..12: note = Table B: HLA-DRB1*01:02L HLA-DRB1*08:04L HLA-DRB1*12:01L HLA-DRB1*15:03L
  source 1..12: note = Severe acute respiratory syndrome coronavirus 2
FQTLLALHRSYL

SEQ ID NO: 19931 - protein, 14 aa, Severe acute respiratory syndrome-related coronavirus
  REGION 1..14: note = Table B: HLA-DRB1*01:02L HLA-DRB1*04:08L
  source 1..14: note = Severe acute respiratory syndrome coronavirus 2
RSYLTPGDSSSGWT

SEQ ID NO: 19932 - protein, 14 aa, Severe acute respiratory syndrome-related coronavirus
  REGION 1..14: note = Table B: HLA-DRB1*01:02L HLA-DRB1*12:01L HLA-DPA1*03:01-B1*105:01L HLA-DRB1*04:08L HLA-DRB1*15:03L
  source 1..14: note = Severe acute respiratory syndrome coronavirus 2
YLQPRTFLLKYNEN

SEQ ID NO: 19933 - protein, 14 aa, Severe acute respiratory syndrome-related coronavirus
  REGION 1..14: note = Table B: HLA-DRB1*01:02L HLA-DPA1*02:01-B1*13:01L
  source 1..14: note = Severe acute respiratory syndrome coronavirus 2
LQPRTFLLKYNENG

SEQ ID NO: 19934 - protein, 14 aa, Severe acute respiratory syndrome-related coronavirus
  REGION 1..14: note = Table B: HLA-DRB1*01:02L
  source 1..14: note = Severe acute respiratory syndrome coronavirus 2
QPRTFLLKYNENGT

SEQ ID NO: 19935 - protein, 15 aa, Severe acute respiratory syndrome-related coronavirus
  REGION 1..15: note = Table B: HLA-DRB1*01:02L
  source 1..15: note = Severe acute respiratory syndrome coronavirus 2
DCALDPLSETKCTLK

SEQ ID NO: 19936 - protein, 14 aa, Severe acute respiratory syndrome-related coronavirus
  REGION 1..14: note = Table B: HLA-DRB1*01:02L
  source 1..14: note = Severe acute respiratory syndrome coronavirus 2
ALDPLSETKCTLKS

SEQ ID NO: 19937 - protein, 14 aa, Severe acute respiratory syndrome-related coronavirus
  REGION 1..14: note = Table B: HLA-DRB1*01:02L HLA-DRB1*15:03L
  source 1..14: note = Severe acute respiratory syndrome coronavirus 2
TNLCPFGEVFNATR

SEQ ID NO: 19938 - protein, 11 aa, Severe acute respiratory syndrome-related coronavirus
  REGION 1..11: note = Table B: HLA-DRB1*01:02L HLA-DRB1*08:04L HLA-DRB1*14:01L HLA-DRB1*11:04L HLA-DRB1*08:01L HLA-DRB1*11:01L HLA-DPA1*01:03-B1*02:01L
  source 1..11: note = Severe acute respiratory syndrome coronavirus 2
FNATRFASVYA

SEQ ID NO: 19939 - protein, 11 aa, Severe acute respiratory syndrome-related coronavirus
  REGION 1..11: note = Table B: HLA-DRB1*01:02L HLA-DRB1*08:01L HLA-DPA1*01:02-B1*04:01L HLA-DRB1*16:01L HLA-DRB1*04:08L HLA-DQA1*02:01-B1*03:03L
  source 1..11: note = Severe acute respiratory syndrome coronavirus 2
FASVYAWNRKR

SEQ ID NO: 19940 - protein, 12 aa, Severe acute respiratory syndrome-related coronavirus
  REGION 1..12: note = Table B: HLA-DRB1*01:02L HLA-DPA1*02:01-B1*13:01L
  source 1..12: note = Severe acute respiratory syndrome coronavirus 2
RKRISNCVADYS

SEQ ID NO: 19941 - protein, 13 aa, Severe acute respiratory syndrome-related coronavirus
  REGION 1..13: note = Table B: HLA-DRB1*01:02L
  source 1..13: note = Severe acute respiratory syndrome coronavirus 2
YADSFVIRGDEVR

SEQ ID NO: 19942 - protein, 14 aa, Severe acute respiratory syndrome-related coronavirus
  REGION 1..14: note = Table B: HLA-DRB1*01:02L HLA-DRB1*15:03L
  source 1..14: note = Severe acute respiratory syndrome coronavirus 2
AWNSNNLDSKVGGN

SEQ ID NO: 19943 - protein, 11 aa, Severe acute respiratory syndrome-related coronavirus
  REGION 1..11: note = Table B: HLA-DRB1*01:02L HLA-DQA1*01:01-B1*05:01L
  source 1..11: note = Severe acute respiratory syndrome coronavirus 2
NLDSKVGGNYN

SEQ ID NO: 19944 - protein, 12 aa, Severe acute respiratory syndrome-related coronavirus
  REGION 1..12: note = Table B: HLA-DRB1*01:02L HLA-DRB1*14:01L HLA-DRB1*08:01L HLA-DRB1*12:01L HLA-DRB1*16:01L HLA-DRB1*04:08L HLA-DRB1*15:03L
  source 1..12: note = Severe acute respiratory syndrome coronavirus 2
YRLFRKSNLKPF

SEQ ID NO: 19945 - protein, 12 aa, Severe acute respiratory syndrome-related coronavirus
  REGION 1..12: note = Table B: HLA-DRB1*01:02L HLA-DRB1*14:01L HLA-DRB1*08:01L HLA-DRB1*12:01L HLA-DPA1*01:02-B1*04:01L HLA-DRB1*16:01L HLA-DRB1*04:08L HLA-DRB1*15:03L
  source 1..12: note = Severe acute respiratory syndrome coronavirus 2
RLFRKSNLKPFE

SEQ ID NO: 19946 - protein, 14 aa, Severe acute respiratory syndrome-related coronavirus
  REGION 1..14: note = Table B: HLA-DRB1*01:02L HLA-DPA1*02:01-B1*13:01L
  source 1..14: note = Severe acute respiratory syndrome coronavirus 2
FRKSNLKPFERDIS

SEQ ID NO: 19947 - protein, 14 aa, Severe acute respiratory syndrome-related coronavirus
  REGION 1..14: note = Table B: HLA-DRB1*01:02L HLA-DPA1*01:03-B1*03:01L HLA-DRB1*08:01L
  source 1..14: note = Severe acute respiratory syndrome coronavirus 2
IYQAGSTPCNGVEG

SEQ ID NO: 19948 - protein, 14 aa, Severe acute respiratory syndrome-related coronavirus
  REGION 1..14: note = Table B: HLA-DRB1*01:02L
  source 1..14: note = Severe acute respiratory syndrome coronavirus 2
FNCYFPLQSYGFQP

SEQ ID NO: 19949 - protein, 12 aa, Severe acute respiratory syndrome-related coronavirus
  REGION 1..12: note = Table B: HLA-DRB1*01:02L HLA-DRB3*02:01L
  source 1..12: note = Severe acute respiratory syndrome coronavirus 2
SYGFQPTNGVGY

SEQ ID NO: 19950 - protein, 12 aa, Severe acute respiratory syndrome-related coronavirus
  REGION 1..12: note = Table B: HLA-DRB1*01:02L HLA-DRB1*07:01L
  source 1..12: note = Severe acute respiratory syndrome coronavirus 2
GFQPTNGVGYQP

SEQ ID NO: 19951 - protein, 15 aa, Severe acute respiratory syndrome-related coronavirus
  REGION 1..15: note = Table B: HLA-DRB1*01:02L HLA-DPA1*03:01-B1*04:02L HLA-DRB1*04:08L
  source 1..15: note = Severe acute respiratory syndrome coronavirus 2
QPTNGVGYQPYRVVV

SEQ ID NO: 19952 - protein, 11 aa, Severe acute respiratory syndrome-related coronavirus
  REGION 1..11: note = Table B: HLA-DRB1*01:02L HLA-DRB3*02:01L HLA-DRB1*14:01L HLA-DPA1*01:03-B1*04:01L HLA-DRB1*12:01L
  source 1..11: note = Severe acute respiratory syndrome coronavirus 2
VGYQPYRVVVL

SEQ ID NO: 19953 - protein, 14 aa, Severe acute respiratory syndrome-related coronavirus
  REGION 1..14: note = Table B: HLA-DRB1*01:02L
  source 1..14: note = Severe acute respiratory syndrome coronavirus 2
HAPATVCGPKKSTN

SEQ ID NO: 19954 - protein, 11 aa, Severe acute respiratory syndrome-related coronavirus
  REGION 1..11: note = Table B: HLA-DRB1*01:02L
  source 1..11: note = Severe acute respiratory syndrome coronavirus 2
NFNGLTGTGVL

SEQ ID NO: 19955 - protein, 11 aa, Severe acute respiratory syndrome-related coronavirus
  REGION 1..11: note = Table B: HLA-DRB1*01:02L
  source 1..11: note = Severe acute respiratory syndrome coronavirus 2
FNGLTGTGVLT

SEQ ID NO: 19956 - protein, 12 aa, Severe acute respiratory syndrome-related coronavirus
  REGION 1..12: note = Table B: HLA-DRB1*01:02L
  source 1..12: note = Severe acute respiratory syndrome coronavirus 2
GTGVLTESNKKF

SEQ ID NO: 19957 - protein, 14 aa, Severe acute respiratory syndrome-related coronavirus
  REGION 1..14: note = Table B: HLA-DRB1*01:02L HLA-DRB1*15:03L
  source 1..14: note = Severe acute respiratory syndrome coronavirus 2
GRDIADTTDAVRDP

SEQ ID NO: 19958 - protein, 14 aa, Severe acute respiratory syndrome-related coronavirus
  REGION 1..14: note = Table B: HLA-DRB1*01:02L
  source 1..14: note = Severe acute respiratory syndrome coronavirus 2
GGVSVITPGTNTSN

SEQ ID NO: 19959 - protein, 16 aa, Severe acute respiratory syndrome-related coronavirus
  REGION 1..16: note = Table B: HLA-DRB1*01:02L
  source 1..16: note = Severe acute respiratory syndrome coronavirus 2
TPGTNTSNQVAVLYQD

SEQ ID NO: 19960 - protein, 13 aa, Severe acute respiratory syndrome-related coronavirus
  REGION 1..13: note = Table B: HLA-DRB1*01:02L
  source 1..13: note = Severe acute respiratory syndrome coronavirus 2
QDVNCTEVPVAIH

SEQ ID NO: 19961 - protein, 14 aa, Severe acute respiratory syndrome-related coronavirus
  REGION 1..14: note = Table B: HLA-DRB1*01:02L
  source 1..14: note = Severe acute respiratory syndrome coronavirus 2
DVNCTEVPVAIHAD

SEQ ID NO: 19962 - protein, 12 aa, Severe acute respiratory syndrome-related coronavirus
  REGION 1..12: note = Table B: HLA-DRB1*01:02L
  source 1..12: note = Severe acute respiratory syndrome coronavirus 2
AIHADQLTPTWR

SEQ ID NO: 19963 - protein, 14 aa, Severe acute respiratory syndrome-related coronavirus
  REGION 1..14: note = Table B: HLA-DRB1*01:02L
  source 1..14: note = Severe acute respiratory syndrome coronavirus 2
NVFQTRAGCLIGAE

SEQ ID NO: 19964 - protein, 14 aa, Severe acute respiratory syndrome-related coronavirus
  REGION 1..14: note = Table B: HLA-DRB1*01:02L HLA-DQA1*05:05-B1*03:19L HLA-DPA1*02:01-B1*13:01L
  source 1..14: note = Severe acute respiratory syndrome coronavirus 2
QTRAGCLIGAEHVN

SEQ ID NO: 19965 - protein, 16 aa, Severe acute respiratory syndrome-related coronavirus
  REGION 1..16: note = Table B: HLA-DRB1*01:02L
  source 1..16: note = Severe acute respiratory syndrome coronavirus 2
IPIGAGICASYQTQTN

SEQ ID NO: 19966 - protein, 11 aa, Severe acute respiratory syndrome-related coronavirus
  REGION 1..11: note = Table B: HLA-DRB1*01:02L
  source 1..11: note = Severe acute respiratory syndrome coronavirus 2
SYQTQTNSPRR

SEQ ID NO: 19967 - protein, 11 aa, Severe acute respiratory syndrome-related coronavirus
  REGION 1..11: note = Table B: HLA-DRB1*01:02L HLA-DRB1*04:08L
  source 1..11: note = Severe acute respiratory syndrome coronavirus 2
YQTQTNSPRRA

SEQ ID NO: 19968 - protein, 13 aa, Severe acute respiratory syndrome-related coronavirus
  REGION 1..13: note = Table B: HLA-DRB1*01:02L
  source 1..13: note = Severe acute respiratory syndrome coronavirus 2
NSPRRARSVASQS

SEQ ID NO: 19969 - protein, 13 aa, Severe acute respiratory syndrome-related coronavirus
  REGION 1..13: note = Table B: HLA-DRB1*01:02L HLA-DPA1*02:01-B1*13:01L
  source 1..13: note = Severe acute respiratory syndrome coronavirus 2
SPRRARSVASQSI

SEQ ID NO: 19970 - protein, 12 aa, Severe acute respiratory syndrome-related coronavirus
  REGION 1..12: note = Table B: HLA-DRB1*01:02L
  source 1..12: note = Severe acute respiratory syndrome coronavirus 2
RSVASQSIIAYT

SEQ ID NO: 19971 - protein, 13 aa, Severe acute respiratory syndrome-related coronavirus
  REGION 1..13: note = Table B: HLA-DRB1*01:02L HLA-DQA1*05:01-B1*02:01L HLA-DRB1*12:01L HLA-DPA1*03:01-B1*105:01L HLA-DRB1*10:01L HLA-DRB1*16:01L HLA-DRB1*15:03L
  source 1..13: note = Severe acute respiratory syndrome coronavirus 2
IAYTMSLGAENSV

SEQ ID NO: 19972 - protein, 15 aa, Severe acute respiratory syndrome-related coronavirus
  REGION 1..15: note = Table B: HLA-DRB1*01:02L
  source 1..15: note = Severe acute respiratory syndrome coronavirus 2
TMSLGAENSVAYSNN

SEQ ID NO: 19973 - protein, 14 aa, Severe acute respiratory syndrome-related coronavirus
  REGION 1..14: note = Table B: HLA-DRB1*01:02L
  source 1..14: note = Severe acute respiratory syndrome coronavirus 2
AYSNNSIAIPTNFT

SEQ ID NO: 19974 - protein, 12 aa, Severe acute respiratory syndrome-related coronavirus
  REGION 1..12: note = Table B: HLA-DRB1*01:02L HLA-DPA1*03:01-B1*105:01L HLA-DRB1*16:01L HLA-DRB1*15:03L
  source 1..12: note = Severe acute respiratory syndrome coronavirus 2
NLLLQYGSFCTQ

SEQ ID NO: 19975 - protein, 13 aa, Severe acute respiratory syndrome-related coronavirus
  REGION 1..13: note = Table B: HLA-DRB1*01:02L HLA-DRB1*08:04L HLA-DRB1*14:01L HLA-DRB1*08:01L
  source 1..13: note = Severe acute respiratory syndrome coronavirus 2
GSFCTQLNRALTG

SEQ ID NO: 19976 - protein, 12 aa, Severe acute respiratory syndrome-related coronavirus
  REGION 1..12: note = Table B: HLA-DRB1*01:02L HLA-DPA1*01:03-B1*03:01L HLA-DPA1*01:03-B1*04:02L HLA-DPA1*02:01-B1*13:01L HLA-DRB1*15:03L
  source 1..12: note = Severe acute respiratory syndrome coronavirus 2
ALTGIAVEQDKN

SEQ ID NO: 19977 - protein, 15 aa, Severe acute respiratory syndrome-related coronavirus
  REGION 1..15: note = Table B: HLA-DRB1*01:02L HLA-DQA1*01:01-B1*05:01L HLA-DRB1*04:08L
  source 1..15: note = Severe acute respiratory syndrome coronavirus 2
VEQDKNTQEVFAQVK

SEQ ID NO: 19978 - protein, 13 aa, Severe acute respiratory syndrome-related coronavirus
  REGION 1..13: note = Table B: HLA-DRB1*01:02L HLA-DPA1*02:01-B1*13:01L
  source 1..13: note = Severe acute respiratory syndrome coronavirus 2
DKNTQEVFAQVKQ

SEQ ID NO: 19979 - protein, 14 aa, Severe acute respiratory syndrome-related coronavirus
  REGION 1..14: note = Table B: HLA-DRB1*01:02L HLA-DPA1*02:01-B1*13:01L HLA-DRB1*16:01L HLA-DRB1*15:03L
  source 1..14: note = Severe acute respiratory syndrome coronavirus 2
KPSKRSFIEDLLFN

SEQ ID NO: 19980 - protein, 14 aa, Severe acute respiratory syndrome-related coronavirus
  REGION 1..14: note = Table B: HLA-DRB1*01:02L HLA-DRB1*15:03L
  source 1..14: note = Severe acute respiratory syndrome coronavirus 2
PSKRSFIEDLLFNK

SEQ ID NO: 19981 - protein, 13 aa, Severe acute respiratory syndrome-related coronavirus
  REGION 1..13: note = Table B: HLA-DRB1*01:02L HLA-DRB1*04:08L
  source 1..13: note = Severe acute respiratory syndrome coronavirus 2
KQYGDCLGDIAAR

SEQ ID NO: 19982 - protein, 14 aa, Severe acute respiratory syndrome-related coronavirus
  REGION 1..14: note = Table B: HLA-DRB1*01:02L
  source 1..14: note = Severe acute respiratory syndrome coronavirus 2
AARDLICAQKFNGL

SEQ ID NO: 19983 - protein, 15 aa, Severe acute respiratory syndrome-related coronavirus
  REGION 1..15: note = Table B: HLA-DRB1*01:02L HLA-DQA1*05:05-B1*03:01L
  source 1..15: note = Severe acute respiratory syndrome coronavirus 2
AQKFNGLTVLPPLLT

SEQ ID NO: 19984 - protein, 14 aa, Severe acute respiratory syndrome-related coronavirus
  REGION 1..14: note = Table B: HLA-DRB1*01:02L HLA-DRB1*12:01L HLA-DQA1*05:05-B1*03:01L HLA-DRB1*15:03L
  source 1..14: note = Severe acute respiratory syndrome coronavirus 2
FNGLTVLPPLLTDE

SEQ ID NO: 19985 - protein, 14 aa, Severe acute respiratory syndrome-related coronavirus
  REGION 1..14: note = Table B: HLA-DRB1*01:02L HLA-DQA1*05:05-B1*03:01L
  source 1..14: note = Severe acute respiratory syndrome coronavirus 2
NGLTVLPPLLTDEM

SEQ ID NO: 19986 - protein, 13 aa, Severe acute respiratory syndrome-related coronavirus
  REGION 1..13: note = Table B: HLA-DRB1*01:02L HLA-DRB1*15:01L
  source 1..13: note = Severe acute respiratory syndrome coronavirus 2
DEMIAQYTSALLA

SEQ ID NO: 19987 - protein, 14 aa, Severe acute respiratory syndrome-related coronavirus
  REGION 1..14: note = Table B: HLA-DRB1*01:02L HLA-DPA1*01:03-B1*03:01L HLA-DPA1*01:03-B1*04:02L HLA-DRB1*04:08L
  source 1..14: note = Severe acute respiratory syndrome coronavirus 2
TSALLAGTITSGWT

SEQ ID NO: 19988 - protein, 14 aa, Severe acute respiratory syndrome-related coronavirus
  REGION 1..14: note = Table B: HLA-DRB1*01:02L HLA-DPA1*01:03-B1*03:01L HLA-DRB1*12:01L HLA-DPA1*03:01-B1*105:01L HLA-DRB1*16:01L HLA-DRB1*15:03L
  source 1..14: note = Severe acute respiratory syndrome coronavirus 2
ITSGWTFGAGAALQ

SEQ ID NO: 19989 - protein, 14 aa, Severe acute respiratory syndrome-related coronavirus
  REGION 1..14: note = Table B: HLA-DRB1*01:02L HLA-DRB1*15:03L
  source 1..14: note = Severe acute respiratory syndrome coronavirus 2
SGWTFGAGAALQIP

SEQ ID NO: 19990 - protein, 14 aa, Severe acute respiratory syndrome-related coronavirus
  REGION 1..14: note = Table B: HLA-DRB1*01:02L
  source 1..14: note = Severe acute respiratory syndrome coronavirus 2
GWTFGAGAALQIPF

SEQ ID NO: 19991 - protein, 14 aa, Severe acute respiratory syndrome-related coronavirus
  REGION 1..14: note = Table B: HLA-DRB1*01:02L HLA-DPA1*03:01-B1*105:01L
  source 1..14: note = Severe acute respiratory syndrome coronavirus 2
AALQIPFAMQMAYR

SEQ ID NO: 19992 - protein, 12 aa, Severe acute respiratory syndrome-related coronavirus
  REGION 1..12: note = Table B: HLA-DRB1*01:02L HLA-DRB1*14:54L
  source 1..12: note = Severe acute respiratory syndrome coronavirus 2
FNGIGVTQNVLY

SEQ ID NO: 19993 - protein, 13 aa, Severe acute respiratory syndrome-related coronavirus
  REGION 1..13: note = Table B: HLA-DRB1*01:02L
  source 1..13: note = Severe acute respiratory syndrome coronavirus 2
VTQNVLYENQKLI

SEQ ID NO: 19994 - protein, 12 aa, Severe acute respiratory syndrome-related coronavirus
  REGION 1..12: note = Table B: HLA-DRB1*01:02L HLA-DRB1*11:04L HLA-DQA1*05:01-B1*02:01L HLA-DRB1*12:01L HLA-DQA1*05:05-B1*03:01L HLA-DRB1*10:01L HLA-DRB1*15:03L
  source 1..12: note = Severe acute respiratory syndrome coronavirus 2
AIGKIQDSLSST

SEQ ID NO: 19995 - protein, 12 aa, Severe acute respiratory syndrome-related coronavirus
  REGION 1..12: note = Table B: HLA-DRB1*01:02L
  source 1..12: note = Severe acute respiratory syndrome coronavirus 2
SLSSTASALGKL

SEQ ID NO: 19996 - protein, 14 aa, Severe acute respiratory syndrome-related coronavirus
  REGION 1..14: note = Table B: HLA-DRB1*01:02L HLA-DRB1*12:01L HLA-DRB1*04:08L HLA-DRB1*15:03L
  source 1..14: note = Severe acute respiratory syndrome coronavirus 2
LSRLDKVEAEVQID

SEQ ID NO: 19997 - protein, 14 aa, Severe acute respiratory syndrome-related coronavirus
  REGION 1..14: note = Table B: HLA-DRB1*01:02L
  source 1..14: note = Severe acute respiratory syndrome coronavirus 2
KVEAEVQIDRLITG

SEQ ID NO: 19998 - protein, 14 aa, Severe acute respiratory syndrome-related coronavirus
  REGION 1..14: note = Table B: HLA-DRB1*01:02L HLA-DRB1*04:08L
  source 1..14: note = Severe acute respiratory syndrome coronavirus 2
VEAEVQIDRLITGR

SEQ ID NO: 19999 - protein, 13 aa, Severe acute respiratory syndrome-related coronavirus
  REGION 1..13: note = Table B: HLA-DRB1*01:02L HLA-DRB1*14:01L HLA-DQA1*03:01-B1*03:02L HLA-DRB1*15:03L
  source 1..13: note = Severe acute respiratory syndrome coronavirus 2
ITGRLQSLQTYVT

SEQ ID NO: 20000 - protein, 12 aa, Severe acute respiratory syndrome-related coronavirus
  REGION 1..12: note = Table B: HLA-DRB1*01:02L HLA-DRB1*12:01L
  source 1..12: note = Severe acute respiratory syndrome coronavirus 2
LQSLQTYVTQQL

SEQ ID NO: 20001 - protein, 11 aa, Severe acute respiratory syndrome-related coronavirus
  REGION 1..11: note = Table B: HLA-DRB1*01:02L
  source 1..11: note = Severe acute respiratory syndrome coronavirus 2
LIRAAEIRASA

SEQ ID NO: 20002 - protein, 14 aa, Severe acute respiratory syndrome-related coronavirus
  REGION 1..14: note = Table B: HLA-DRB1*01:02L HLA-DPA1*01:03-B1*02:01L HLA-DRB1*15:03L
  source 1..14: note = Severe acute respiratory syndrome coronavirus 2
SANLAATKMSECVL

SEQ ID NO: 20003 - protein, 14 aa, Severe acute respiratory syndrome-related coronavirus
  REGION 1..14: note = Table B: HLA-DRB1*01:02L HLA-DPA1*01:03-B1*02:01L HLA-DRB1*04:08L HLA-DRB1*15:03L
  source 1..14: note = Severe acute respiratory syndrome coronavirus 2
ANLAATKMSECVLG

SEQ ID NO: 20004 - protein, 14 aa, Severe acute respiratory syndrome-related coronavirus
  REGION 1..14: note = Table B: HLA-DRB1*01:02L
  source 1..14: note = Severe acute respiratory syndrome coronavirus 2
KMSECVLGQSKRVD

SEQ ID NO: 20005 - protein, 13 aa, Severe acute respiratory syndrome-related coronavirus
  REGION 1..13: note = Table B: HLA-DRB1*01:02L
  source 1..13: note = Severe acute respiratory syndrome coronavirus 2
VFLHVTYVPAQEK

SEQ ID NO: 20006 - protein, 12 aa, Severe acute respiratory syndrome-related coronavirus
  REGION 1..12: note = Table B: HLA-DRB1*01:02L HLA-DRB1*04:08L
  source 1..12: note = Severe acute respiratory syndrome coronavirus 2
FTTAPAICHDGK

SEQ ID NO: 20007 - protein, 14 aa, Severe acute respiratory syndrome-related coronavirus
  REGION 1..14: note = Table B: HLA-DRB1*01:02L
  source 1..14: note = Severe acute respiratory syndrome coronavirus 2
TAPAICHDGKAHFP

SEQ ID NO: 20008 - protein, 15 aa, Severe acute respiratory syndrome-related coronavirus
  REGION 1..15: note = Table B: HLA-DRB1*01:02L
  source 1..15: note = Severe acute respiratory syndrome coronavirus 2
GKAHFPREGVFVSNG

SEQ ID NO: 20009 - protein, 14 aa, Severe acute respiratory syndrome-related coronavirus
  REGION 1..14: note = Table B: HLA-DRB1*01:02L
  source 1..14: note = Severe acute respiratory syndrome coronavirus 2
FPREGVFVSNGTHW

SEQ ID NO: 20010 - protein, 14 aa, Severe acute respiratory syndrome-related coronavirus
  REGION 1..14: note = Table B: HLA-DRB1*01:02L HLA-DPA1*03:01-B1*105:01L
  source 1..14: note = Severe acute respiratory syndrome coronavirus 2
VSNGTHWFVTQRNF

SEQ ID NO: 20011 - protein, 13 aa, Severe acute respiratory syndrome-related coronavirus
  REGION 1..13: note = Table B: HLA-DRB1*01:02L HLA-DRB1*08:04L
  source 1..13: note = Severe acute respiratory syndrome coronavirus 2
NGTHWFVTQRNFY

SEQ ID NO: 20012 - protein, 12 aa, Severe acute respiratory syndrome-related coronavirus
  REGION 1..12: note = Table B: HLA-DRB1*01:02L
  source 1..12: note = Severe acute respiratory syndrome coronavirus 2
VIGIVNNTVYDP

SEQ ID NO: 20013 - protein, 12 aa, Severe acute respiratory syndrome-related coronavirus
  REGION 1..12: note = Table B: HLA-DRB1*01:02L HLA-DPA1*01:03-B1*03:01L HLA-DRB1*14:02L HLA-DPA1*01:03-B1*04:02L HLA-DQA1*05:05-B1*03:01L
  source 1..12: note = Severe acute respiratory syndrome coronavirus 2
VYDPLQPELDSF

SEQ ID NO: 20014 - protein, 13 aa, Severe acute respiratory syndrome-related coronavirus
  REGION 1..13: note = Table B: HLA-DRB1*01:02L
  source 1..13: note = Severe acute respiratory syndrome coronavirus 2
LDSFKEELDKYFK

SEQ ID NO: 20015 - protein, 14 aa, Severe acute respiratory syndrome-related coronavirus
  REGION 1..14: note = Table B: HLA-DRB1*01:02L
  source 1..14: note = Severe acute respiratory syndrome coronavirus 2
DSFKEELDKYFKNH

SEQ ID NO: 20016 - protein, 12 aa, Severe acute respiratory syndrome-related coronavirus
  REGION 1..12: note = Table B: HLA-DRB1*01:02L HLA-DQA1*05:01-B1*02:01L HLA-DRB1*12:01L HLA-DPA1*02:01-B1*13:01L HLA-DQA1*01:03-B1*06:01L HLA-DRB1*15:03L
  source 1..12: note = Severe acute respiratory syndrome coronavirus 2
FKNHTSPDVDLG

SEQ ID NO: 20017 - protein, 15 aa, Severe acute respiratory syndrome-related coronavirus
  REGION 1..15: note = Table B: HLA-DRB1*01:02L HLA-DPA1*01:03-B1*03:01L
  source 1..15: note = Severe acute respiratory syndrome coronavirus 2
SPDVDLGDISGINAS

SEQ ID NO: 20018 - protein, 12 aa, Severe acute respiratory syndrome-related coronavirus
  REGION 1..12: note = Table B: HLA-DRB1*01:02L
  source 1..12: note = Severe acute respiratory syndrome coronavirus 2
KEIDRLNEVAKN

SEQ ID NO: 20019 - protein, 13 aa, Severe acute respiratory syndrome-related coronavirus
  REGION 1..13: note = Table B: HLA-DRB1*01:02L HLA-DRB1*11:04L HLA-DRB1*11:01L HLA-DRB1*16:01L HLA-DRB1*08:03L
  source 1..13: note = Severe acute respiratory syndrome coronavirus 2
DRLNEVAKNLNES

SEQ ID NO: 20020 - protein, 14 aa, Severe acute respiratory syndrome-related coronavirus
  REGION 1..14: note = Table B: HLA-DRB1*01:02L HLA-DPA1*01:03-B1*03:01L HLA-DPA1*03:01-B1*04:02L
  source 1..14: note = Severe acute respiratory syndrome coronavirus 2
AKNLNESLIDLQEL

SEQ ID NO: 20021 - protein, 13 aa, Severe acute respiratory syndrome-related coronavirus
  REGION 1..13: note = Table B: HLA-DRB1*01:02L
  source 1..13: note = Severe acute respiratory syndrome coronavirus 2
NESLIDLQELGKY

SEQ ID NO: 20022 - protein, 12 aa, Severe acute respiratory syndrome-related coronavirus
  REGION 1..12: note = Table B: HLA-DRB1*01:02L HLA-DRB1*04:08L
  source 1..12: note = Severe acute respiratory syndrome coronavirus 2
SLIDLQELGKYE

SEQ ID NO: 20023 - protein, 12 aa, Severe acute respiratory syndrome-related coronavirus
  REGION 1..12: note = Table B: HLA-DRB1*01:02L HLA-DRB1*08:04L HLA-DRB1*04:08L
  source 1..12: note = Severe acute respiratory syndrome coronavirus 2
LIDLQELGKYEQ

SEQ ID NO: 20024 - protein, 14 aa, Severe acute respiratory syndrome-related coronavirus
  REGION 1..14: note = Table B: HLA-DRB1*01:02L
  source 1..14: note = Severe acute respiratory syndrome coronavirus 2
LQELGKYEQYIKWP

SEQ ID NO: 20025 - protein, 12 aa, Severe acute respiratory syndrome-related coronavirus
  REGION 1..12: note = Table B: HLA-DRB1*01:02L HLA-DRB3*01:01L HLA-DPA1*03:01-B1*105:01L
  source 1..12: note = Severe acute respiratory syndrome coronavirus 2
KFDEDDSEPVLK

SEQ ID NO: 20026 - protein, 12 aa, Severe acute respiratory syndrome-related coronavirus
  REGION 1..12: note = Table B: HLA-DRB1*01:02L HLA-DQA1*03:01-B1*03:02L HLA-DQA1*01:03-B1*06:01L
  source 1..12: note = Severe acute respiratory syndrome coronavirus 2
EPVLKGVKLHYT

SEQ ID NO: 20027 - protein, 14 aa, Severe acute respiratory syndrome-related coronavirus
  REGION 1..14: note = Table B: HLA-DRB1*01:02L HLA-DRB1*12:01L HLA-DQA1*05:05-B1*03:01L HLA-DRB1*15:03L
  source 1..14: note = Severe acute respiratory syndrome coronavirus 2
IVGVALLAVFQSAS

SEQ ID NO: 20028 - protein, 12 aa, Severe acute respiratory syndrome-related coronavirus
  REGION 1..12: note = Table B: HLA-DRB1*01:02L HLA-DRB1*16:01L
  source 1..12: note = Severe acute respiratory syndrome coronavirus 2
FVTVYSHLLLVA

SEQ ID NO: 20029 - protein, 12 aa, Severe acute respiratory syndrome-related coronavirus
  REGION 1..12: note = Table B: HLA-DRB1*01:02L
  source 1..12: note = Severe acute respiratory syndrome coronavirus 2
PYNSVTSSIVIT

SEQ ID NO: 20030 - protein, 13 aa, Severe acute respiratory syndrome-related coronavirus
  REGION 1..13: note = Table B: HLA-DRB1*01:02L
  source 1..13: note = Severe acute respiratory syndrome coronavirus 2
GDGTTSPISEHDY

SEQ ID NO: 20031 - protein, 13 aa, Severe acute respiratory syndrome-related coronavirus
  REGION 1..13: note = Table B: HLA-DRB1*01:02L HLA-DRB1*04:10L
  source 1..13: note = Severe acute respiratory syndrome coronavirus 2
DGTTSPISEHDYQ

SEQ ID NO: 20032 - protein, 12 aa, Severe acute respiratory syndrome-related coronavirus
  REGION 1..12: note = Table B: HLA-DRB1*01:02L
  source 1..12: note = Severe acute respiratory syndrome coronavirus 2
DYQIGGYTEKWE

SEQ ID NO: 20033 - protein, 13 aa, Severe acute respiratory syndrome-related coronavirus
  REGION 1..13: note = Table B: HLA-DRB1*01:02L
  source 1..13: note = Severe acute respiratory syndrome coronavirus 2
YQIGGYTEKWESG

SEQ ID NO: 20034 - protein, 13 aa, Severe acute respiratory syndrome-related coronavirus
  REGION 1..13: note = Table B: HLA-DRB1*01:02L HLA-DPA1*02:01-B1*13:01L HLA-DQA1*03:01-B1*03:02L HLA-DPA1*01:02-B1*04:01L
  source 1..13: note = Severe acute respiratory syndrome coronavirus 2
VVLHSYFTSDYYQ

SEQ ID NO: 20035 - protein, 11 aa, Severe acute respiratory syndrome-related coronavirus
  REGION 1..11: note = Table B: HLA-DRB1*01:02L
  source 1..11: note = Severe acute respiratory syndrome coronavirus 2
YYQLYSTQLST

SEQ ID NO: 20036 - protein, 15 aa, Severe acute respiratory syndrome-related coronavirus
  REGION 1..15: note = Table B: HLA-DRB1*01:02L HLA-DRB1*04:10L HLA-DRB1*12:01L
  source 1..15: note = Severe acute respiratory syndrome coronavirus 2
EPEEHVQIHTIDGSS

SEQ ID NO: 20037 - protein, 12 aa, Severe acute respiratory syndrome-related coronavirus
  REGION 1..12: note = Table B: HLA-DRB1*01:02L HLA-DRB1*14:01L HLA-DRB1*16:01L
  source 1..12: note = Severe acute respiratory syndrome coronavirus 2
LAILTALRLCAY

SEQ ID NO: 20038 - protein, 12 aa, Severe acute respiratory syndrome-related coronavirus
  REGION 1..12: note = Table B: HLA-DRB1*01:02L
  source 1..12: note = Severe acute respiratory syndrome coronavirus 2
VSLVKPSFYVYS

SEQ ID NO: 20039 - protein, 12 aa, Severe acute respiratory syndrome-related coronavirus
  REGION 1..12: note = Table B: HLA-DRB1*01:02L HLA-DRB1*08:04L HLA-DPA1*03:01-B1*04:02L HLA-DRB1*14:01L HLA-DRB1*12:01L HLA-DPA1*03:01-B1*105:01L HLA-DRB1*15:03L
  source 1..12: note = Severe acute respiratory syndrome coronavirus 2
PSFYVYSRVKNL

SEQ ID NO: 20040 - protein, 14 aa, Severe acute respiratory syndrome-related coronavirus
  REGION 1..14: note = Table B: HLA-DRB1*01:02L
  source 1..14: note = Severe acute respiratory syndrome coronavirus 2
VEELKKLLEQWNLV

SEQ ID NO: 20041 - protein, 12 aa, Severe acute respiratory syndrome-related coronavirus
  REGION 1..12: note = Table B: HLA-DRB1*01:02L HLA-DRB1*12:01L HLA-DPA1*02:01-B1*13:01L HLA-DPA1*03:01-B1*105:01L HLA-DRB1*15:03L
  source 1..12: note = Severe acute respiratory syndrome coronavirus 2
KKLLEQWNLVIG

SEQ ID NO: 20042 - protein, 13 aa, Severe acute respiratory syndrome-related coronavirus
  REGION 1..13: note = Table B: HLA-DRB1*01:02L
  source 1..13: note = Severe acute respiratory syndrome coronavirus 2
ICLLQFAYANRNR

SEQ ID NO: 20043 - protein, 11 aa, Severe acute respiratory syndrome-related coronavirus
  REGION 1..11: note = Table B: HLA-DRB1*01:02L HLA-DPA1*03:01-B1*04:02L HLA-DPA1*03:01-B1*105:01L
  source 1..11: note = Severe acute respiratory syndrome coronavirus 2
LQFAYANRNRF

SEQ ID NO: 20044 - protein, 10 aa, Severe acute respiratory syndrome-related coronavirus
  REGION 1..10: note = Table B: HLA-DRB1*01:02L HLA-DRB1*14:01L HLA-DPA1*01:02-B1*04:01L HLA-DRB1*16:01L HLA-DQA1*02:01-B1*03:03L HLA-DRB1*15:03L
  source 1..10: note = Severe acute respiratory syndrome coronavirus 2
FAYANRNRFL

SEQ ID NO: 20045 - protein, 12 aa, Severe acute respiratory syndrome-related coronavirus
  REGION 1..12: note = Table B: HLA-DRB1*01:02L
  source 1..12: note = Severe acute respiratory syndrome coronavirus 2
YANRNRFLYIIK

SEQ ID NO: 20046 - protein, 14 aa, Severe acute respiratory syndrome-related coronavirus
  REGION 1..14: note = Table B: HLA-DRB1*01:02L
  source 1..14: note = Severe acute respiratory syndrome coronavirus 2
FRLFARTRSMWSFN

SEQ ID NO: 20047 - protein, 13 aa, Severe acute respiratory syndrome-related coronavirus
  REGION 1..13: note = Table B: HLA-DRB1*01:02L HLA-DPA1*02:01-B1*13:01L
  source 1..13: note = Severe acute respiratory syndrome coronavirus 2
RTRSMWSFNPETN

SEQ ID NO: 20048 - protein, 11 aa, Severe acute respiratory syndrome-related coronavirus
  REGION 1..11: note = Table B: HLA-DRB1*01:02L
  source 1..11: note = Severe acute respiratory syndrome coronavirus 2
SFNPETNILLN

SEQ ID NO: 20049 - protein, 12 aa, Severe acute respiratory syndrome-related coronavirus
  REGION 1..12: note = Table B: HLA-DRB1*01:02L
  source 1..12: note = Severe acute respiratory syndrome coronavirus 2
NVPLHGTILTRP

SEQ ID NO: 20050 - protein, 14 aa, Severe acute respiratory syndrome-related coronavirus
  REGION 1..14: note = Table B: HLA-DRB1*01:02L HLA-DPA1*02:01-B1*13:01L HLA-DRB1*15:03L
  source 1..14: note = Severe acute respiratory syndrome coronavirus 2
ILTRPLLESELVIG

SEQ ID NO: 20051 - protein, 14 aa, Severe acute respiratory syndrome-related coronavirus
  REGION 1..14: note = Table B: HLA-DRB1*01:02L HLA-DRB1*15:03L
  source 1..14: note = Severe acute respiratory syndrome coronavirus 2
LESELVIGAVILRG

SEQ ID NO: 20052 - protein, 13 aa, Severe acute respiratory syndrome-related coronavirus
  REGION 1..13: note = Table B: HLA-DRB1*01:02L HLA-DRB1*04:08L
  source 1..13: note = Severe acute respiratory syndrome coronavirus 2
SELVIGAVILRGH

SEQ ID NO: 20053 - protein, 15 aa, Severe acute respiratory syndrome-related coronavirus
  REGION 1..15: note = Table B: HLA-DRB1*01:02L
  source 1..15: note = Severe acute respiratory syndrome coronavirus 2
HLRIAGHHLGRCDIK

SEQ ID NO: 20054 - protein, 14 aa, Severe acute respiratory syndrome-related coronavirus
  REGION 1..14: note = Table B: HLA-DRB1*01:02L
  source 1..14: note = Severe acute respiratory syndrome coronavirus 2
RIAGHHLGRCDIKD

SEQ ID NO: 20055 - protein, 14 aa, Severe acute respiratory syndrome-related coronavirus
  REGION 1..14: note = Table B: HLA-DRB1*01:02L HLA-DRB1*08:01L
  source 1..14: note = Severe acute respiratory syndrome coronavirus 2
GHHLGRCDIKDLPK

SEQ ID NO: 20056 - protein, 12 aa, Severe acute respiratory syndrome-related coronavirus
  REGION 1..12: note = Table B: HLA-DRB1*01:02L HLA-DRB1*04:08L
  source 1..12: note = Severe acute respiratory syndrome coronavirus 2
TVATSRTLSYYK

SEQ ID NO: 20057 - protein, 13 aa, Severe acute respiratory syndrome-related coronavirus
  REGION 1..13: note = Table B: HLA-DRB1*01:02L
  source 1..13: note = Severe acute respiratory syndrome coronavirus 2
VATSRTLSYYKLG

SEQ ID NO: 20058 - protein, 11 aa, Severe acute respiratory syndrome-related coronavirus
  REGION 1..11: note = Table B: HLA-DRB1*01:02L HLA-DQA1*05:05-B1*03:19L HLA-DRB1*15:03L
  source 1..11: note = Severe acute respiratory syndrome coronavirus 2
SYYKLGASQRV

SEQ ID NO: 20059 - protein, 12 aa, Severe acute respiratory syndrome-related coronavirus
  REGION 1..12: note = Table B: HLA-DRB1*01:02L HLA-DRB1*14:01L HLA-DRB1*12:01L HLA-DRB1*16:01L HLA-DRB1*15:03L
  source 1..12: note = Severe acute respiratory syndrome coronavirus 2
FAAYSRYRIGNY

SEQ ID NO: 20060 - protein, 12 aa, Severe acute respiratory syndrome-related coronavirus
  REGION 1..12: note = Table B: HLA-DRB1*01:02L HLA-DRB1*08:04L HLA-DRB1*11:03L HLA-DQA1*03:01-B1*03:02L HLA-DRB1*10:01L HLA-DRB1*15:03L
  source 1..12: note = Severe acute respiratory syndrome coronavirus 2
NYKLNTDHSSSS

SEQ ID NO: 20061 - protein, 13 aa, Severe acute respiratory syndrome-related coronavirus
  REGION 1..13: note = Table B: HLA-DRB1*01:02L HLA-DRB1*14:01L HLA-DPA1*02:01-B1*13:01L
  source 1..13: note = Severe acute respiratory syndrome coronavirus 2
IKNLSKSLTENKY

SEQ ID NO: 20062 - protein, 13 aa, Severe acute respiratory syndrome-related coronavirus
  REGION 1..13: note = Table B: HLA-DRB1*01:02L
  source 1..13: note = Severe acute respiratory syndrome coronavirus 2
NLSKSLTENKYSQ

SEQ ID NO: 20063 - protein, 12 aa, Severe acute respiratory syndrome-related coronavirus
  REGION 1..12: note = Table B: HLA-DRB1*01:02L HLA-DRB1*12:01L HLA-DRB1*15:03L
  source 1..12: note = Severe acute respiratory syndrome coronavirus 2
ALITLATCELYH

SEQ ID NO: 20064 - protein, 13 aa, Severe acute respiratory syndrome-related coronavirus
  REGION 1..13: note = Table B: HLA-DRB1*01:02L
  source 1..13: note = Severe acute respiratory syndrome coronavirus 2
LITLATCELYHYQ

SEQ ID NO: 20065 - protein, 15 aa, Severe acute respiratory syndrome-related coronavirus
  REGION 1..15: note = Table B: HLA-DRB1*01:02L
  source 1..15: note = Severe acute respiratory syndrome coronavirus 2
GTTVLLKEPCSSGTY

SEQ ID NO: 20066 - protein, 14 aa, Severe acute respiratory syndrome-related coronavirus
  REGION 1..14: note = Table B: HLA-DRB1*01:02L HLA-DPA1*01:03-B1*03:01L HLA-DRB1*15:03L
  source 1..14: note = Severe acute respiratory syndrome coronavirus 2
TYEGNSPFHPLADN

SEQ ID NO: 20067 - protein, 14 aa, Severe acute respiratory syndrome-related coronavirus
  REGION 1..14: note = Table B: HLA-DRB1*01:02L
  source 1..14: note = Severe acute respiratory syndrome coronavirus 2
YEGNSPFHPLADNK

SEQ ID NO: 20068 - protein, 15 aa, Severe acute respiratory syndrome-related coronavirus
  REGION 1..15: note = Table B: HLA-DRB1*01:02L
  source 1..15: note = Severe acute respiratory syndrome coronavirus 2
LTCFSTQFAFACPDG

SEQ ID NO: 20069 - protein, 14 aa, Severe acute respiratory syndrome-related coronavirus
  REGION 1..14: note = Table B: HLA-DRB1*01:02L
  source 1..14: note = Severe acute respiratory syndrome coronavirus 2
FAFACPDGVKHVYQ

SEQ ID NO: 20070 - protein, 13 aa, Severe acute respiratory syndrome-related coronavirus
  REGION 1..13: note = Table B: HLA-DRB1*01:02L
  source 1..13: note = Severe acute respiratory syndrome coronavirus 2
PDGVKHVYQLRAR

SEQ ID NO: 20071 - protein, 13 aa, Severe acute respiratory syndrome-related coronavirus
  REGION 1..13: note = Table B: HLA-DRB1*01:02L
  source 1..13: note = Severe acute respiratory syndrome coronavirus 2
LRARSVSPKLFIR

SEQ ID NO: 20072 - protein, 14 aa, Severe acute respiratory syndrome-related coronavirus
  REGION 1..14: note = Table B: HLA-DRB1*01:02L
  source 1..14: note = Severe acute respiratory syndrome coronavirus 2
RARSVSPKLFIRQE

SEQ ID NO: 20073 - protein, 12 aa, Severe acute respiratory syndrome-related coronavirus
  REGION 1..12: note = Table B: HLA-DRB1*01:02L HLA-DQA1*05:05-B1*03:01L
  source 1..12: note = Severe acute respiratory syndrome coronavirus 2
LFIRQEEVQELY

SEQ ID NO: 20074 - protein, 12 aa, Severe acute respiratory syndrome-related coronavirus
  REGION 1..12: note = Table B: HLA-DRB1*01:02L
  source 1..12: note = Severe acute respiratory syndrome coronavirus 2
FIRQEEVQELYS

SEQ ID NO: 20075 - protein, 10 aa, Severe acute respiratory syndrome-related coronavirus
  REGION 1..10: note = Table B: HLA-DRB1*01:02L HLA-DRB1*16:01L
  source 1..10: note = Severe acute respiratory syndrome coronavirus 2
ITLCFTLKRK

SEQ ID NO: 20076 - protein, 14 aa, Severe acute respiratory syndrome-related coronavirus
  REGION 1..14: note = Table B: HLA-DRB1*01:02L HLA-DQA1*05:05-B1*03:01L
  source 1..14: note = Severe acute respiratory syndrome coronavirus 2
AAFHQECSLQSCTQ

SEQ ID NO: 20077 - protein, 13 aa, Severe acute respiratory syndrome-related coronavirus
  REGION 1..13: note = Table B: HLA-DRB1*01:02L HLA-DRB1*08:01L HLA-DRB1*12:01L
  source 1..13: note = Severe acute respiratory syndrome coronavirus 2
PIHFYSKWYIRVG

SEQ ID NO: 20078 - protein, 14 aa, Severe acute respiratory syndrome-related coronavirus
  REGION 1..14: note = Table B: HLA-DRB1*01:02L HLA-DRB1*11:01L HLA-DRB1*12:01L
  source 1..14: note = Severe acute respiratory syndrome coronavirus 2
IHFYSKWYIRVGAR

SEQ ID NO: 20079 - protein, 14 aa, Severe acute respiratory syndrome-related coronavirus
  REGION 1..14: note = Table B: HLA-DRB1*01:02L
  source 1..14: note = Severe acute respiratory syndrome coronavirus 2
HFYSKWYIRVGARK

SEQ ID NO: 20080 - protein, 14 aa, Severe acute respiratory syndrome-related coronavirus
  REGION 1..14: note = Table B: HLA-DRB1*01:02L HLA-DRB1*08:01L HLA-DRB1*11:01L
  source 1..14: note = Severe acute respiratory syndrome coronavirus 2
VDEAGSKSPIQYID

SEQ ID NO: 20081 - protein, 16 aa, Severe acute respiratory syndrome-related coronavirus
  REGION 1..16: note = Table B: HLA-DRB1*01:02L HLA-DRB1*15:03L
  source 1..16: note = Severe acute respiratory syndrome coronavirus 2
YTVSCLPFTINCQEPK

SEQ ID NO: 20082 - protein, 14 aa, Severe acute respiratory syndrome-related coronavirus
  REGION 1..14: note = Table B: HLA-DRB1*01:02L
  source 1..14: note = Severe acute respiratory syndrome coronavirus 2
INCQEPKLGSLVVR

SEQ ID NO: 20083 - protein, 13 aa, Severe acute respiratory syndrome-related coronavirus
  REGION 1..13: note = Table B: HLA-DRB1*01:02L
  source 1..13: note = Severe acute respiratory syndrome coronavirus 2
QEPKLGSLVVRCS

SEQ ID NO: 20084 - protein, 15 aa, Severe acute respiratory syndrome-related coronavirus
  REGION 1..15: note = Table B: HLA-DRB1*01:02L
  source 1..15: note = Severe acute respiratory syndrome coronavirus 2
EPKLGSLVVRCSFYE

SEQ ID NO: 20085 - protein, 16 aa, Severe acute respiratory syndrome-related coronavirus
  REGION 1..16: note = Table B: HLA-DRB1*01:02L HLA-DQA1*01:03-B1*06:01L
  source 1..16: note = Severe acute respiratory syndrome coronavirus 2
GPQNQRNAPRITFGGP

SEQ ID NO: 20086 - protein, 14 aa, Severe acute respiratory syndrome-related coronavirus
  REGION 1..14: note = Table B: HLA-DRB1*01:02L
  source 1..14: note = Severe acute respiratory syndrome coronavirus 2
NGERSGARSKQRRP

SEQ ID NO: 20087 - protein, 14 aa, Severe acute respiratory syndrome-related coronavirus
  REGION 1..14: note = Table B: HLA-DRB1*01:02L
  source 1..14: note = Severe acute respiratory syndrome coronavirus 2
GERSGARSKQRRPQ

SEQ ID NO: 20088 - protein, 14 aa, Severe acute respiratory syndrome-related coronavirus
  REGION 1..14: note = Table B: HLA-DRB1*01:02L HLA-DRB1*12:01L HLA-DPA1*02:01-B1*13:01L
  source 1..14: note = Severe acute respiratory syndrome coronavirus 2
SKQRRPQGLPNNTA

SEQ ID NO: 20089 - protein, 15 aa, Severe acute respiratory syndrome-related coronavirus
  REGION 1..15: note = Table B: HLA-DRB1*01:02L HLA-DRB1*16:01L
  source 1..15: note = Severe acute respiratory syndrome coronavirus 2
TQHGKEDLKFPRGQG

SEQ ID NO: 20090 - protein, 14 aa, Severe acute respiratory syndrome-related coronavirus
  REGION 1..14: note = Table B: HLA-DRB1*01:02L
  source 1..14: note = Severe acute respiratory syndrome coronavirus 2
TNSSPDDQIGYYRR

SEQ ID NO: 20091 - protein, 12 aa, Severe acute respiratory syndrome-related coronavirus
  REGION 1..12: note = Table B: HLA-DRB1*01:02L HLA-DRB1*08:01L HLA-DRB3*01:01L HLA-DRB1*16:01L HLA-DRB1*04:08L
  source 1..12: note = Severe acute respiratory syndrome coronavirus 2
IGYYRRATRRIR

SEQ ID NO: 20092 - protein, 12 aa, Severe acute respiratory syndrome-related coronavirus
  REGION 1..12: note = Table B: HLA-DRB1*01:02L HLA-DPA1*03:01-B1*105:01L HLA-DPA1*01:02-B1*04:01L
  source 1..12: note = Severe acute respiratory syndrome coronavirus 2
DGKMKDLSPRWY

SEQ ID NO: 20093 - protein, 13 aa, Severe acute respiratory syndrome-related coronavirus
  REGION 1..13: note = Table B: HLA-DRB1*01:02L HLA-DPA1*01:03-B1*03:01L
  source 1..13: note = Severe acute respiratory syndrome coronavirus 2
TGPEAGLPYGANK

SEQ ID NO: 20094 - protein, 13 aa, Severe acute respiratory syndrome-related coronavirus
  REGION 1..13: note = Table B: HLA-DRB1*01:02L HLA-DRB1*12:01L
  source 1..13: note = Severe acute respiratory syndrome coronavirus 2
GPEAGLPYGANKD

SEQ ID NO: 20095 - protein, 12 aa, Severe acute respiratory syndrome-related coronavirus
  REGION 1..12: note = Table B: HLA-DRB1*01:02L HLA-DRB1*08:01L HLA-DQA1*05:05-B1*03:19L HLA-DPA1*03:01-B1*105:01L HLA-DRB1*14:54L HLA-DRB1*10:01L HLA-DRB1*04:08L
  source 1..12: note = Severe acute respiratory syndrome coronavirus 2
ATEGALNTPKDH

SEQ ID NO: 20096 - protein, 14 aa, Severe acute respiratory syndrome-related coronavirus
  REGION 1..14: note = Table B: HLA-DRB1*01:02L
  source 1..14: note = Severe acute respiratory syndrome coronavirus 2
EGALNTPKDHIGTR

SEQ ID NO: 20097 - protein, 16 aa, Severe acute respiratory syndrome-related coronavirus
  REGION 1..16: note = Table B: HLA-DRB1*01:02L
  source 1..16: note = Severe acute respiratory syndrome coronavirus 2
GALNTPKDHIGTRNPA

SEQ ID NO: 20098 - protein, 12 aa, Severe acute respiratory syndrome-related coronavirus
  REGION 1..12: note = Table B: HLA-DRB1*01:02L
  source 1..12: note = Severe acute respiratory syndrome coronavirus 2
VLQLPQGTTLPK

SEQ ID NO: 20099 - protein, 15 aa, Severe acute respiratory syndrome-related coronavirus
  REGION 1..15: note = Table B: HLA-DRB1*01:02L
  source 1..15: note = Severe acute respiratory syndrome coronavirus 2
LPQGTTLPKGFYAEG

SEQ ID NO: 20100 - protein, 14 aa, Severe acute respiratory syndrome-related coronavirus
  REGION 1..14: note = Table B: HLA-DRB1*01:02L
  source 1..14: note = Severe acute respiratory syndrome coronavirus 2
YAEGSRGGSQASSR

SEQ ID NO: 20101 - protein, 14 aa, Severe acute respiratory syndrome-related coronavirus
  REGION 1..14: note = Table B: HLA-DRB1*01:02L HLA-DRB1*08:01L HLA-DRB1*04:08L
  source 1..14: note = Severe acute respiratory syndrome coronavirus 2
SRGGSQASSRSSSR

SEQ ID NO: 20102 - protein, 14 aa, Severe acute respiratory syndrome-related coronavirus
  REGION 1..14: note = Table B: HLA-DRB1*01:02L
  source 1..14: note = Severe acute respiratory syndrome coronavirus 2
SRNSSRNSTPGSSR

SEQ ID NO: 20103 - protein, 16 aa, Severe acute respiratory syndrome-related coronavirus
  REGION 1..16: note = Table B: HLA-DRB1*01:02L
  source 1..16: note = Severe acute respiratory syndrome coronavirus 2
SSRNSTPGSSRGTSPA

SEQ ID NO: 20104 - protein, 16 aa, Severe acute respiratory syndrome-related coronavirus
  REGION 1..16: note = Table B: HLA-DRB1*01:02L
  source 1..16: note = Severe acute respiratory syndrome coronavirus 2
SSRGTSPARMAGNGGD

SEQ ID NO: 20105 - protein, 14 aa, Severe acute respiratory syndrome-related coronavirus
  REGION 1..14: note = Table B: HLA-DRB1*01:02L HLA-DPA1*01:03-B1*03:01L HLA-DRB1*14:01L HLA-DQA1*01:01-B1*05:01L HLA-DRB1*08:01L HLA-DQA1*05:01-B1*02:01L HLA-DRB1*04:10L HLA-DRB1*12:01L HLA-DPA1*03:01-B1*105:01L HLA-DRB1*04:08L
  source 1..14: note = Severe acute respiratory syndrome coronavirus 2
GTSPARMAGNGGDA

SEQ ID NO: 20106 - protein, 13 aa, Severe acute respiratory syndrome-related coronavirus
  REGION 1..13: note = Table B: HLA-DRB1*01:02L HLA-DRB3*02:01L HLA-DPA1*01:03-B1*03:01L HLA-DQA1*01-B1*05L HLA-DPA1*01:03-B1*04:01L HLA-DPA1*01:03-B1*04:02L HLA-DPA1*02:01-B1*13:01L HLA-DRB1*16:01L HLA-DRB1*04:08L
  source 1..13: note = Severe acute respiratory syndrome coronavirus 2
DAALALLLLDRLN

SEQ ID NO: 20107 - protein, 16 aa, Severe acute respiratory syndrome-related coronavirus
  REGION 1..16: note = Table B: HLA-DRB1*01:02L HLA-DRB1*11:01L HLA-DPA1*02:01-B1*13:01L
  source 1..16: note = Severe acute respiratory syndrome coronavirus 2
LESKMSGKGQQQQGQT

SEQ ID NO: 20108 - protein, 12 aa, Severe acute respiratory syndrome-related coronavirus
  REGION 1..12: note = Table B: HLA-DRB1*01:02L
  source 1..12: note = Severe acute respiratory syndrome coronavirus 2
KKSAAEASKKPR

SEQ ID NO: 20109 - protein, 13 aa, Severe acute respiratory syndrome-related coronavirus
  REGION 1..13: note = Table B: HLA-DRB1*01:02L
  source 1..13: note = Severe acute respiratory syndrome coronavirus 2
KSAAEASKKPRQK

SEQ ID NO: 20110 - protein, 13 aa, Severe acute respiratory syndrome-related coronavirus
  REGION 1..13: note = Table B: HLA-DRB1*01:02L
  source 1..13: note = Severe acute respiratory syndrome coronavirus 2
SAAEASKKPRQKR

SEQ ID NO: 20111 - protein, 16 aa, Severe acute respiratory syndrome-related coronavirus
  REGION 1..16: note = Table B: HLA-DRB1*01:02L HLA-DRB3*01:01L
  source 1..16: note = Severe acute respiratory syndrome coronavirus 2
AAEASKKPRQKRTATK

SEQ ID NO: 20112 - protein, 12 aa, Severe acute respiratory syndrome-related coronavirus
  REGION 1..12: note = Table B: HLA-DRB1*01:02L
  source 1..12: note = Severe acute respiratory syndrome coronavirus 2
RTATKAYNVTQA

SEQ ID NO: 20113 - protein, 12 aa, Severe acute respiratory syndrome-related coronavirus
  REGION 1..12: note = Table B: HLA-DRB1*01:02L HLA-DRB1*04:08L HLA-DQA1*02:01-B1*03:03L
  source 1..12: note = Severe acute respiratory syndrome coronavirus 2
TKAYNVTQAFGR

SEQ ID NO: 20114 - protein, 13 aa, Severe acute respiratory syndrome-related coronavirus
  REGION 1..13: note = Table B: HLA-DRB1*01:02L
  source 1..13: note = Severe acute respiratory syndrome coronavirus 2
QGNFGDQELIRQG

SEQ ID NO: 20115 - protein, 14 aa, Severe acute respiratory syndrome-related coronavirus
  REGION 1..14: note = Table B: HLA-DRB1*01:02L HLA-DRB1*08:04L HLA-DRB1*08:01L HLA-DRB1*15:03L
  source 1..14: note = Severe acute respiratory syndrome coronavirus 2
GNFGDQELIRQGTD

SEQ ID NO: 20116 - protein, 14 aa, Severe acute respiratory syndrome-related coronavirus
  REGION 1..14: note = Table B: HLA-DRB1*01:02L
  source 1..14: note = Severe acute respiratory syndrome coronavirus 2
FGDQELIRQGTDYK

SEQ ID NO: 20117 - protein, 14 aa, Severe acute respiratory syndrome-related coronavirus
  REGION 1..14: note = Table B: HLA-DRB1*01:02L HLA-DRB1*08:04L HLA-DRB1*08:01L HLA-DRB1*12:01L HLA-DRB1*15:03L
  source 1..14: note = Severe acute respiratory syndrome coronavirus 2
TDYKHWPQIAQFAP

SEQ ID NO: 20118 - protein, 13 aa, Severe acute respiratory syndrome-related coronavirus
  REGION 1..13: note = Table B: HLA-DRB1*01:02L HLA-DRB1*04:08L
  source 1..13: note = Severe acute respiratory syndrome coronavirus 2
FAPSASAFFGMSR

SEQ ID NO: 20119 - protein, 12 aa, Severe acute respiratory syndrome-related coronavirus
  REGION 1..12: note = Table B: HLA-DRB1*01:02L
  source 1..12: note = Severe acute respiratory syndrome coronavirus 2
AYKTFPPTEPKK

SEQ ID NO: 20120 - protein, 14 aa, Severe acute respiratory syndrome-related coronavirus
  REGION 1..14: note = Table B: HLA-DRB1*01:02L
  source 1..14: note = Severe acute respiratory syndrome coronavirus 2
YKTFPPTEPKKDKK

SEQ ID NO: 20121 - protein, 14 aa, Severe acute respiratory syndrome-related coronavirus
  REGION 1..14: note = Table B: HLA-DRB1*01:02L HLA-DRB1*04:08L
  source 1..14: note = Severe acute respiratory syndrome coronavirus 2
KTFPPTEPKKDKKK

SEQ ID NO: 20122 - protein, 14 aa, Severe acute respiratory syndrome-related coronavirus
  REGION 1..14: note = Table B: HLA-DRB1*01:02L
  source 1..14: note = Severe acute respiratory syndrome coronavirus 2
FPPTEPKKDKKKKA

SEQ ID NO: 20123 - protein, 14 aa, Severe acute respiratory syndrome-related coronavirus
  REGION 1..14: note = Table B: HLA-DRB1*01:02L
  source 1..14: note = Severe acute respiratory syndrome coronavirus 2
KKKADETQALPQRQ

SEQ ID NO: 20124 - protein, 12 aa, Severe acute respiratory syndrome-related coronavirus
  REGION 1..12: note = Table B: HLA-DRB1*01:02L HLA-DQA1*05:05-B1*03:19L HLA-DRB1*04:08L
  source 1..12: note = Severe acute respiratory syndrome coronavirus 2
ETQALPQRQKKQ

SEQ ID NO: 20125 - protein, 16 aa, Severe acute respiratory syndrome-related coronavirus
  REGION 1..16: note = Table B: HLA-DRB1*01:02L
  source 1..16: note = Severe acute respiratory syndrome coronavirus 2
LPQRQKKQQTVTLLPA

SEQ ID NO: 20126 - protein, 15 aa, Severe acute respiratory syndrome-related coronavirus
  REGION 1..15: note = Table B: HLA-DRB1*01:02L HLA-DPA1*02:01-B1*13:01L HLA-DRB1*04:08L
  source 1..15: note = Severe acute respiratory syndrome coronavirus 2
RQKKQQTVTLLPAAD

SEQ ID NO: 20127 - protein, 13 aa, Severe acute respiratory syndrome-related coronavirus
  REGION 1..13: note = Table B: HLA-DRB1*01:02L HLA-DPA1*01:03-B1*03:01L HLA-DRB1*16:01L HLA-DRB1*15:03L
  source 1..13: note = Severe acute respiratory syndrome coronavirus 2
KQQTVTLLPAADL

SEQ ID NO: 20128 - protein, 12 aa, Severe acute respiratory syndrome-related coronavirus
  REGION 1..12: note = Table B: HLA-DRB1*01:02L HLA-DQA1*05:05-B1*03:19L HLA-DPA1*03:01-B1*105:01L HLA-DQA1*05:05-B1*03:01L
  source 1..12: note = Severe acute respiratory syndrome coronavirus 2
VTLLPAADLDDF

SEQ ID NO: 20129 - protein, 13 aa, Severe acute respiratory syndrome-related coronavirus
  REGION 1..13: note = Table B: HLA-DRB1*01:02L HLA-DPA1*03:01-B1*04:02L HLA-DRB1*12:01L HLA-DRB1*16:01L HLA-DRB1*15:03L
  source 1..13: note = Severe acute respiratory syndrome coronavirus 2
LDDFSKQLQQSMS

SEQ ID NO: 20130 - protein, 14 aa, Severe acute respiratory syndrome-related coronavirus
  REGION 1..14: note = Table B: HLA-DRB1*01:02L
  source 1..14: note = Severe acute respiratory syndrome coronavirus 2
DDFSKQLQQSMSSA

SEQ ID NO: 20131 - protein, 15 aa, Severe acute respiratory syndrome-related coronavirus
  REGION 1..15: note = Table B: HLA-DRB1*01:02L HLA-DQA1*05:05-B1*03:19L HLA-DQA1*05:01-B1*02:01L HLA-DRB1*12:01L HLA-DPA1*01:03-B1*104:01L HLA-DQA1*01:03-B1*06:01L
  source 1..15: note = Severe acute respiratory syndrome coronavirus 2
DFSKQLQQSMSSADS

SEQ ID NO: 20132 - protein, 11 aa, Severe acute respiratory syndrome-related coronavirus
  REGION 1..11: note = Table B: HLA-DRB4*03:01NL HLA-DRB1*08:77L HLA-DPA1*01:03-B1*03:01L HLA-DRB1*03:01L HLA-DRB1*14:01L HLA-DPA1*01:03-B1*04:01L HLA-DPA1*01:03-B1*04:02L HLA-DRB1*12:01L HLA-DPA1*02:01-B1*13:01L
  REGION 1..11: note = CONT. FROM ABOVE: HLA-DPA1*01:03-B1*104:01L HLA-DRB1*10:01L HLA- DQA1*01:03-B1*06:01L HLA-DRB1*08:02L HLA-DRB1*15:03L
  source 1..11: note = Severe acute respiratory syndrome coronavirus 2
VPHVGEIPVAY

SEQ ID NO: 20133 - protein, 15 aa, Severe acute respiratory syndrome-related coronavirus
  REGION 1..15: note = Table B: HLA-DRB4*03:01NL HLA-DRB1*11:03L HLA-DRB1*14:54L HLA-DRB1*07:01L
  source 1..15: note = Severe acute respiratory syndrome coronavirus 2
VTRELMRELNGGAYT

SEQ ID NO: 20134 - protein, 15 aa, Severe acute respiratory syndrome-related coronavirus
  REGION 1..15: note = Table B: HLA-DRB4*03:01NL HLA-DRB1*11:04L HLA-DRB1*14:54L HLA-DRB1*10:01L
  source 1..15: note = Severe acute respiratory syndrome coronavirus 2
GAWNIGEQKSILSPL

SEQ ID NO: 20135 - protein, 12 aa, Severe acute respiratory syndrome-related coronavirus
  REGION 1..12: note = Table B: HLA-DRB4*03:01NL HLA-DRB1*14:54L HLA-DRB1*08:03L
  source 1..12: note = Severe acute respiratory syndrome coronavirus 2
GTVYEKLKPVLD

SEQ ID NO: 20136 - protein, 11 aa, Severe acute respiratory syndrome-related coronavirus
  REGION 1..11: note = Table B: HLA-DRB4*03:01NL HLA-DRB1*14:01L HLA-DRB1*11:01L HLA-DPA1*02:01-B1*13:01L
  source 1..11: note = Severe acute respiratory syndrome coronavirus 2
MLLEIKDTEKY

SEQ ID NO: 20137 - protein, 13 aa, Severe acute respiratory syndrome-related coronavirus
  REGION 1..13: note = Table B: HLA-DRB4*03:01NL HLA-DRB1*08:04L HLA-DRB1*08:77L HLA-DRB3*02:01L
  source 1..13: note = Severe acute respiratory syndrome coronavirus 2
INGNLHPDSATLV

SEQ ID NO: 20138 - protein, 11 aa, Severe acute respiratory syndrome-related coronavirus
  REGION 1..11: note = Table B: HLA-DRB4*03:01NL HLA-DRB1*14:01L HLA-DRB1*08:02L
  source 1..11: note = Severe acute respiratory syndrome coronavirus 2
SEYKGPITDVF

SEQ ID NO: 20139 - protein, 12 aa, Severe acute respiratory syndrome-related coronavirus
  REGION 1..12: note = Table B: HLA-DRB4*03:01NL HLA-DRB1*11:02L
  source 1..12: note = Severe acute respiratory syndrome coronavirus 2
EEVGHTDLMAAY

SEQ ID NO: 20140 - protein, 12 aa, Severe acute respiratory syndrome-related coronavirus
  REGION 1..12: note = Table B: HLA-DRB4*03:01NL HLA-DRB3*02:01L HLA-DPA1*01:03-B1*03:01L HLA-DPA1*03:01-B1*04:02L HLA-DQA1*05:05-B1*03:01L
  source 1..12: note = Severe acute respiratory syndrome coronavirus 2
INLVQMAPISAM

SEQ ID NO: 20141 - protein, 15 aa, Severe acute respiratory syndrome-related coronavirus
  REGION 1..15: note = Table B: HLA-DRB4*03:01NL HLA-DRB1*08:77L HLA-DPA1*01:03-B1*03:01L HLA-DRB1*03:01L HLA-DRB1*11:03L HLA-DRB1*14:02L HLA-DRB1*08:01L HLA-DRB1*11:01L HLA-DQA1*05:05-B1*03:19L HLA-DQA1*05:01-B1*02:01L
  REGION 1..15: note = CONT. FROM ABOVE: HLA-DRB3*01:01L
  source 1..15: note = Severe acute respiratory syndrome coronavirus 2
LDNLRANNTKGSLPI

SEQ ID NO: 20142 - protein, 13 aa, Severe acute respiratory syndrome-related coronavirus
  REGION 1..13: note = Table B: HLA-DRB4*03:01NL HLA-DRB3*02:01L HLA-DQA1*05:05-B1*03:19L HLA-DPA1*01:03-B1*04:02L HLA-DPA1*01:02-B1*04:01L HLA-DRB1*10:01L
  source 1..13: note = Severe acute respiratory syndrome coronavirus 2
NVIVFDGKSKCEE

SEQ ID NO: 20143 - protein, 13 aa, Severe acute respiratory syndrome-related coronavirus
  REGION 1..13: note = Table B: HLA-DRB4*03:01NL HLA-DRB1*04:10L
  source 1..13: note = Severe acute respiratory syndrome coronavirus 2
ALVSDVGDSAEVA

SEQ ID NO: 20144 - protein, 12 aa, Severe acute respiratory syndrome-related coronavirus
  REGION 1..12: note = Table B: HLA-DRB4*03:01NL HLA-DRB1*16:01L HLA-DRB1*04:08L
  source 1..12: note = Severe acute respiratory syndrome coronavirus 2
TWLDMVDTSLSG

SEQ ID NO: 20145 - protein, 12 aa, Severe acute respiratory syndrome-related coronavirus
  REGION 1..12: note = Table B: HLA-DRB4*03:01NL HLA-DQA1*01-B1*05L HLA-DRB1*04:10L HLA-DPA1*03:01-B1*105:01L HLA-DRB1*16:01L HLA-DRB1*04:08L
  source 1..12: note = Severe acute respiratory syndrome coronavirus 2
AFATAQEAYEQA

SEQ ID NO: 20146 - protein, 14 aa, Severe acute respiratory syndrome-related coronavirus
  REGION 1..14: note = Table B: HLA-DRB4*03:01NL HLA-DRB3*02:01L HLA-DPA1*01:03-B1*03:01L HLA-DPA1*03:01-B1*04:02L HLA-DPA1*02:01-B1*13:01L HLA-DPA1*01:03-B1*02:01L HLA-DPA1*01:03-B1*104:01L
  source 1..14: note = Severe acute respiratory syndrome coronavirus 2
LGSLAATVRLQAGN

SEQ ID NO: 20147 - protein, 12 aa, Severe acute respiratory syndrome-related coronavirus
  REGION 1..12: note = Table B: HLA-DRB4*03:01NL HLA-DRB1*04:10L HLA-DPA1*03:01-B1*105:01L HLA-DQA1*05:05-B1*03:01L HLA-DRB1*16:01L
  source 1..12: note = Severe acute respiratory syndrome coronavirus 2
GIVGVLTLDNQD

SEQ ID NO: 20148 - protein, 12 aa, Severe acute respiratory syndrome-related coronavirus
  REGION 1..12: note = Table B: HLA-DRB4*03:01NL HLA-DRB1*04:10L HLA-DRB1*12:01L HLA-DPA1*03:01-B1*105:01L HLA-DRB1*14:54L HLA-DQA1*05:05-B1*03:01L HLA-DRB1*16:01L
  source 1..12: note = Severe acute respiratory syndrome coronavirus 2
IVGVLTLDNQDL

SEQ ID NO: 20149 - protein, 12 aa, Severe acute respiratory syndrome-related coronavirus
  REGION 1..12: note = Table B: HLA-DRB4*03:01NL HLA-DRB1*16:01L
  source 1..12: note = Severe acute respiratory syndrome coronavirus 2
GVLTLDNQDLNG

SEQ ID NO: 20150 - protein, 14 aa, Severe acute respiratory syndrome-related coronavirus
  REGION 1..14: note = Table B: HLA-DRB4*03:01NL HLA-DRB1*11:02L
  source 1..14: note = Severe acute respiratory syndrome coronavirus 2
WDLLKYDFTEERLK

SEQ ID NO: 20151 - protein, 13 aa, Severe acute respiratory syndrome-related coronavirus
  REGION 1..13: note = Table B: HLA-DRB4*03:01NL HLA-DRB1*08:04L
  source 1..13: note = Severe acute respiratory syndrome coronavirus 2
GDDYVYLPYPDPS

SEQ ID NO: 20152 - protein, 15 aa, Severe acute respiratory syndrome-related coronavirus
  REGION 1..15: note = Table B: HLA-DRB4*03:01NL HLA-DRB1*08:04L HLA-DRB1*11:04L HLA-DRB1*14:02L HLA-DRB1*04:10L HLA-DPA1*02:01-B1*13:01L HLA-DPA1*01:03-B1*02:01L
  source 1..15: note = Severe acute respiratory syndrome coronavirus 2
FVLTSHTVMPLSAPT

SEQ ID NO: 20153 - protein, 13 aa, Severe acute respiratory syndrome-related coronavirus
  REGION 1..13: note = Table B: HLA-DRB4*03:01NL HLA-DRB1*11:04L HLA-DRB1*09:01L HLA-DRB3*01:01L
  source 1..13: note = Severe acute respiratory syndrome coronavirus 2
LALYYPSARIVYT

SEQ ID NO: 20154 - protein, 11 aa, Severe acute respiratory syndrome-related coronavirus
  REGION 1..11: note = Table B: HLA-DRB4*03:01NL HLA-DQA1*03:01-B1*03:02L
  source 1..11: note = Severe acute respiratory syndrome coronavirus 2
TRVLSNLNLPG

SEQ ID NO: 20155 - protein, 12 aa, Severe acute respiratory syndrome-related coronavirus
  REGION 1..12: note = Table B: HLA-DRB4*03:01NL HLA-DRB1*08:04L HLA-DRB1*14:01L HLA-DRB1*08:01L HLA-DRB1*04:10L HLA-DRB1*12:01L HLA-DRB1*14:54L HLA-DRB1*14:17L HLA-DRB1*04:08L HLA-DRB1*08:03L
  source 1..12: note = Severe acute respiratory syndrome coronavirus 2
NTVYTKVDGVDV

SEQ ID NO: 20156 - protein, 11 aa, Severe acute respiratory syndrome-related coronavirus
  REGION 1..11: note = Table B: HLA-DRB4*03:01NL HLA-DRB1*14:17L HLA-DQA1*02:01-B1*03:03L
  source 1..11: note = Severe acute respiratory syndrome coronavirus 2
LVRDLPQGFSA

SEQ ID NO: 20157 - protein, 14 aa, Severe acute respiratory syndrome-related coronavirus
  REGION 1..14: note = Table B: HLA-DRB4*03:01NL HLA-DRB1*14:17L
  source 1..14: note = Severe acute respiratory syndrome coronavirus 2
GEVFNATRFASVYA

SEQ ID NO: 20158 - protein, 13 aa, Severe acute respiratory syndrome-related coronavirus
  REGION 1..13: note = Table B: HLA-DRB4*03:01NL HLA-DRB1*08:04L HLA-DRB1*14:02L HLA-DQA1*01:01-B1*05:01L HLA-DRB1*04:10L HLA-DRB1*14:17L HLA-DRB1*10:01L HLA-DRB1*08:03L
  source 1..13: note = Severe acute respiratory syndrome coronavirus 2
GGFNFSQILPDPS

SEQ ID NO: 20159 - protein, 11 aa, Severe acute respiratory syndrome-related coronavirus
  REGION 1..11: note = Table B: HLA-DRB4*03:01NL HLA-DQA1*01-B1*05L
  source 1..11: note = Severe acute respiratory syndrome coronavirus 2
KLQDVVNQNAQ

SEQ ID NO: 20160 - protein, 11 aa, Severe acute respiratory syndrome-related coronavirus
  REGION 1..11: note = Table B: HLA-DRB4*03:01NL HLA-DQA1*01:01-B1*05:01L HLA-DRB1*04:10L HLA-DQA1*05:05-B1*03:01L HLA-DRB1*14:17L HLA-DRB1*04:08L
  source 1..11: note = Severe acute respiratory syndrome coronavirus 2
TVYDPLQPELD

SEQ ID NO: 20161 - protein, 11 aa, Severe acute respiratory syndrome-related coronavirus
  REGION 1..11: note = Table B: HLA-DRB4*03:01NL HLA-DRB1*04:08L
  source 1..11: note = Severe acute respiratory syndrome coronavirus 2
SWFTALTQHGK

SEQ ID NO: 20162 - protein, 12 aa, Severe acute respiratory syndrome-related coronavirus
  REGION 1..12: note = Table B: HLA-DRB1*08:04L HLA-DRB1*14:54L
  source 1..12: note = Severe acute respiratory syndrome coronavirus 2
VPGFNEKTHVQL

SEQ ID NO: 20163 - protein, 15 aa, Severe acute respiratory syndrome-related coronavirus
  REGION 1..15: note = Table B: HLA-DRB1*08:04L HLA-DRB3*02:01L HLA-DQA1*05:05-B1*03:19L HLA-DQA1*05:05-B1*03:01L
  source 1..15: note = Severe acute respiratory syndrome coronavirus 2
LPVLQVRDVLVRGFG

SEQ ID NO: 20164 - protein, 13 aa, Severe acute respiratory syndrome-related coronavirus
  REGION 1..13: note = Table B: HLA-DRB1*08:04L HLA-DRB1*03:01L HLA-DRB1*11:03L HLA-DRB1*11:01L HLA-DRB1*08:03L
  source 1..13: note = Severe acute respiratory syndrome coronavirus 2
VEEVLSEARQHLK

SEQ ID NO: 20165 - protein, 12 aa, Severe acute respiratory syndrome-related coronavirus
  REGION 1..12: note = Table B: HLA-DRB1*08:04L HLA-DRB1*12:02L HLA-DRB1*14:54L HLA-DPA1*01:03-B1*104:01L
  source 1..12: note = Severe acute respiratory syndrome coronavirus 2
GIQYGRSGETLG

SEQ ID NO: 20166 - protein, 16 aa, Severe acute respiratory syndrome-related coronavirus
  REGION 1..16: note = Table B: HLA-DRB1*08:04L HLA-DRB1*10:01L
  source 1..16: note = Severe acute respiratory syndrome coronavirus 2
SGETLGVLVPHVGEIP

SEQ ID NO: 20167 - protein, 14 aa, Severe acute respiratory syndrome-related coronavirus
  REGION 1..14: note = Table B: HLA-DRB1*08:04L
  source 1..14: note = Severe acute respiratory syndrome coronavirus 2
LGVLVPHVGEIPVA

SEQ ID NO: 20168 - protein, 13 aa, Severe acute respiratory syndrome-related coronavirus
  REGION 1..13: note = Table B: HLA-DRB1*08:04L HLA-DRB1*14:54L HLA-DRB1*04:08L HLA-DRB1*08:03L
  source 1..13: note = Severe acute respiratory syndrome coronavirus 2
GHSYGADLKSFDL

SEQ ID NO: 20169 - protein, 15 aa, Severe acute respiratory syndrome-related coronavirus
  REGION 1..15: note = Table B: HLA-DRB1*08:04L HLA-DPA1*01:03-B1*02:01L
  source 1..15: note = Severe acute respiratory syndrome coronavirus 2
RELNGGAYTRYVDNN

SEQ ID NO: 20170 - protein, 17 aa, Severe acute respiratory syndrome-related coronavirus
  REGION 1..17: note = Table B: HLA-DRB1*08:04L HLA-DRB1*11:01L
  source 1..17: note = Severe acute respiratory syndrome coronavirus 2
IKDLLARAGKASCTLSE

SEQ ID NO: 20171 - protein, 14 aa, Severe acute respiratory syndrome-related coronavirus
  REGION 1..14: note = Table B: HLA-DRB1*08:04L HLA-DRB1*11:01L HLA-DRB1*16:01L
  source 1..14: note = Severe acute respiratory syndrome coronavirus 2
RGVYCCREHEHEIA

SEQ ID NO: 20172 - protein, 11 aa, Severe acute respiratory syndrome-related coronavirus
  REGION 1..11: note = Table B: HLA-DRB1*08:04L HLA-DPA1*01:03-B1*03:01L HLA-DRB1*11:03L HLA-DRB1*11:04L HLA-DRB1*14:02L HLA-DRB1*08:01L HLA-DQA1*01-B1*05L HLA-DPA1*01:03-B1*04:01L HLA-DRB1*04:10L HLA-DRB1*09:01L HLA-DPA1*02:01-B1*13:01L HLA-DRB1*07:01L
  source 1..11: note = Severe acute respiratory syndrome coronavirus 2
SIIKTIQPRVE

SEQ ID NO: 20173 - protein, 12 aa, Severe acute respiratory syndrome-related coronavirus
  REGION 1..12: note = Table B: HLA-DRB1*08:04L HLA-DRB3*02:01L HLA-DPA1*01:03-B1*03:01L HLA-DPA1*03:01-B1*04:02L HLA-DRB1*11:04L HLA-DRB1*14:02L HLA-DQA1*01:01-B1*05:01L HLA-DRB1*11:01L HLA-DQA1*01-B1*05L HLA-DPA1*01:03-B1*04:01L
  REGION 1..12: note = CONT. FROM ABOVE: HLA-DRB1*09:01L HLA-DPA1*01:03-B1*04:02L HLA-D PA1*02:01-B1*13:01L HLA-DPA1*01:03-B1*104:01L HLA-DRB1*07:01L HL A-DRB1*10:01L HLA-DRB1*08:03L
  source 1..12: note = Severe acute respiratory syndrome coronavirus 2
AYWVPRASANIG

SEQ ID NO: 20174 - protein, 11 aa, Severe acute respiratory syndrome-related coronavirus
  REGION 1..11: note = Table B: HLA-DRB1*08:04L HLA-DRB1*08:77L HLA-DPA1*03:01-B1*04:02L HLA-DRB1*11:04L HLA-DRB3*01:01L
  source 1..11: note = Severe acute respiratory syndrome coronavirus 2
NIVGDFKLNEE

SEQ ID NO: 20175 - protein, 16 aa, Severe acute respiratory syndrome-related coronavirus
  REGION 1..16: note = Table B: HLA-DRB1*08:04L HLA-DPA1*03:01-B1*04:02L HLA-DPA1*01:03-B1*04:02L HLA-DQA1*05:05-B1*03:01L HLA-DQA1*01:03-B1*06:01L
  source 1..16: note = Severe acute respiratory syndrome coronavirus 2
DYKAFKQIVESCGNFK

SEQ ID NO: 20176 - protein, 13 aa, Severe acute respiratory syndrome-related coronavirus
  REGION 1..13: note = Table B: HLA-DRB1*08:04L HLA-DRB3*02:01L HLA-DRB1*04:10L
  source 1..13: note = Severe acute respiratory syndrome coronavirus 2
ITILDGISQYSLR

SEQ ID NO: 20177 - protein, 16 aa, Severe acute respiratory syndrome-related coronavirus
  REGION 1..16: note = Table B: HLA-DRB1*08:04L HLA-DRB1*03:01L HLA-DRB1*11:02L
  source 1..16: note = Severe acute respiratory syndrome coronavirus 2
DAMMFTSDLATNNLVV

SEQ ID NO: 20178 - protein, 12 aa, Severe acute respiratory syndrome-related coronavirus
  REGION 1..12: note = Table B: HLA-DRB1*08:04L HLA-DRB3*01:01L HLA-DPA1*01:03-B1*02:01L
  source 1..12: note = Severe acute respiratory syndrome coronavirus 2
LTNIFGTVYEKL

SEQ ID NO: 20179 - protein, 14 aa, Severe acute respiratory syndrome-related coronavirus
  REGION 1..14: note = Table B: HLA-DRB1*08:04L HLA-DRB1*08:01L
  source 1..14: note = Severe acute respiratory syndrome coronavirus 2
VYEKLKPVLDWLEE

SEQ ID NO: 20180 - protein, 15 aa, Severe acute respiratory syndrome-related coronavirus
  REGION 1..15: note = Table B: HLA-DRB1*08:04L HLA-DPA1*01:03-B1*04:02L
  source 1..15: note = Severe acute respiratory syndrome coronavirus 2
IKESVQTFFKLVNKF

SEQ ID NO: 20181 - protein, 13 aa, Severe acute respiratory syndrome-related coronavirus
  REGION 1..13: note = Table B: HLA-DRB1*08:04L HLA-DRB1*04:08L
  source 1..13: note = Severe acute respiratory syndrome coronavirus 2
DSIIIGGAKLKAL

SEQ ID NO: 20182 - protein, 12 aa, Severe acute respiratory syndrome-related coronavirus
  REGION 1..12: note = Table B: HLA-DRB1*08:04L HLA-DRB1*07:01L HLA-DRB1*08:03L
  source 1..12: note = Severe acute respiratory syndrome coronavirus 2
ETFVTHSKGLYR

SEQ ID NO: 20183 - protein, 13 aa, Severe acute respiratory syndrome-related coronavirus
  REGION 1..13: note = Table B: HLA-DRB1*08:04L HLA-DRB1*08:03L
  source 1..13: note = Severe acute respiratory syndrome coronavirus 2
GLYRKCVKSREET

SEQ ID NO: 20184 - protein, 13 aa, Severe acute respiratory syndrome-related coronavirus
  REGION 1..13: note = Table B: HLA-DRB1*08:04L HLA-DRB1*11:02L HLA-DRB1*11:03L HLA-DRB1*11:04L HLA-DRB1*14:02L HLA-DQA1*01:01-B1*05:01L HLA-DPA1*01:03-B1*04:01L HLA-DRB1*09:01L HLA-DRB1*12:02L HLA-DRB3*01:01L HLA-DRB1*07:01L HLA-DRB1*10:01L HLA-DRB1*08:03L
  source 1..13: note = Severe acute respiratory syndrome coronavirus 2
VIEVQGYKSVNIT

SEQ ID NO: 20185 - protein, 14 aa, Severe acute respiratory syndrome-related coronavirus
  REGION 1..14: note = Table B: HLA-DRB1*08:04L
  source 1..14: note = Severe acute respiratory syndrome coronavirus 2
VQGYKSVNITFELD

SEQ ID NO: 20186 - protein, 12 aa, Severe acute respiratory syndrome-related coronavirus
  REGION 1..12: note = Table B: HLA-DRB1*08:04L HLA-DPA1*01:03-B1*03:01L
  source 1..12: note = Severe acute respiratory syndrome coronavirus 2
ITFELDERIDKV

SEQ ID NO: 20187 - protein, 17 aa, Severe acute respiratory syndrome-related coronavirus
  REGION 1..17: note = Table B: HLA-DRB1*08:04L HLA-DPA1*03:01-B1*04:02L HLA-DRB1*11:02L HLA-DRB1*11:01L HLA-DPA1*01:03-B1*04:02L HLA-DPA1*01:03-B1*104:01L
  source 1..17: note = Severe acute respiratory syndrome coronavirus 2
LDERIDKVLNEKCSAYT

SEQ ID NO: 20188 - protein, 14 aa, Severe acute respiratory syndrome-related coronavirus
  REGION 1..14: note = Table B: HLA-DRB1*08:04L HLA-DQA1*01:01-B1*05:01L HLA-DRB1*04:08L
  source 1..14: note = Severe acute respiratory syndrome coronavirus 2
VVADAVIKTLQPVS

SEQ ID NO: 20189 - protein, 13 aa, Severe acute respiratory syndrome-related coronavirus
  REGION 1..13: note = Table B: HLA-DRB1*08:04L
  source 1..13: note = Severe acute respiratory syndrome coronavirus 2
ESGEFKLASHMYC

SEQ ID NO: 20190 - protein, 12 aa, Severe acute respiratory syndrome-related coronavirus
  REGION 1..12: note = Table B: HLA-DRB1*08:04L HLA-DRB1*08:01L
  source 1..12: note = Severe acute respiratory syndrome coronavirus 2
GEFKLASHMYCS

SEQ ID NO: 20191 - protein, 13 aa, Severe acute respiratory syndrome-related coronavirus
  REGION 1..13: note = Table B: HLA-DRB1*08:04L HLA-DRB1*11:04L HLA-DRB5*01:01L HLA-DRB1*04:10L HLA-DRB3*01:01L HLA-DRB1*07:01L HLA-DRB1*04:08L HLA-DRB1*08:03L
  source 1..13: note = Severe acute respiratory syndrome coronavirus 2
EEEFEPSTQYEYG

SEQ ID NO: 20192 - protein, 13 aa, Severe acute respiratory syndrome-related coronavirus
  REGION 1..13: note = Table B: HLA-DRB1*08:04L HLA-DRB1*14:17L HLA-DRB1*04:08L
  source 1..13: note = Severe acute respiratory syndrome coronavirus 2
VQTIEVNSFSGYL

SEQ ID NO: 20193 - protein, 12 aa, Severe acute respiratory syndrome-related coronavirus
  REGION 1..12: note = Table B: HLA-DRB1*08:04L HLA-DRB1*11:03L HLA-DRB1*14:17L HLA-DRB1*07:01L
  source 1..12: note = Severe acute respiratory syndrome coronavirus 2
PTVVVNAANVYL

SEQ ID NO: 20194 - protein, 12 aa, Severe acute respiratory syndrome-related coronavirus
  REGION 1..12: note = Table B: HLA-DRB1*08:04L
  source 1..12: note = Severe acute respiratory syndrome coronavirus 2
LAVFDKNLYDKL

SEQ ID NO: 20195 - protein, 14 aa, Severe acute respiratory syndrome-related coronavirus
  REGION 1..14: note = Table B: HLA-DRB1*08:04L
  source 1..14: note = Severe acute respiratory syndrome coronavirus 2
DKNLYDKLVSSFLE

SEQ ID NO: 20196 - protein, 11 aa, Severe acute respiratory syndrome-related coronavirus
  REGION 1..11: note = Table B: HLA-DRB1*08:04L HLA-DRB1*11:04L HLA-DRB1*11:01L HLA-DPA1*02:01-B1*13:01L HLA-DPA1*01:03-B1*104:01L HLA-DQA1*05:05-B1*03:01L
  source 1..11: note = Severe acute respiratory syndrome coronavirus 2
TLEETKFLTEN

SEQ ID NO: 20197 - protein, 12 aa, Severe acute respiratory syndrome-related coronavirus
  REGION 1..12: note = Table B: HLA-DRB1*08:04L HLA-DRB3*02:01L HLA-DPA1*02:01-B1*13:01L HLA-DQA1*05:05-B1*03:01L
  source 1..12: note = Severe acute respiratory syndrome coronavirus 2
LEETKFLTENLL

SEQ ID NO: 20198 - protein, 14 aa, Severe acute respiratory syndrome-related coronavirus
  REGION 1..14: note = Table B: HLA-DRB1*08:04L HLA-DPA1*01:03-B1*02:01L
  source 1..14: note = Severe acute respiratory syndrome coronavirus 2
ETKFLTENLLLYID

SEQ ID NO: 20199 - protein, 12 aa, Severe acute respiratory syndrome-related coronavirus
  REGION 1..12: note = Table B: HLA-DRB1*08:04L HLA-DPA1*01:03-B1*03:01L HLA-DRB1*11:03L HLA-DRB1*14:02L HLA-DRB1*08:01L HLA-DRB1*12:02L
  source 1..12: note = Severe acute respiratory syndrome coronavirus 2
YIDINGNLHPDS

SEQ ID NO: 20200 - protein, 13 aa, Severe acute respiratory syndrome-related coronavirus
  REGION 1..13: note = Table B: HLA-DRB1*08:04L HLA-DRB1*15:03L
  source 1..13: note = Severe acute respiratory syndrome coronavirus 2
DITFLKKDAPYIV

SEQ ID NO: 20201 - protein, 16 aa, Severe acute respiratory syndrome-related coronavirus
  REGION 1..16: note = Table B: HLA-DRB1*08:04L HLA-DRB1*11:01L HLA-DPA1*02:01-B1*13:01L
  source 1..16: note = Severe acute respiratory syndrome coronavirus 2
GTTEMLAKALRKVPTD

SEQ ID NO: 20202 - protein, 13 aa, Severe acute respiratory syndrome-related coronavirus
  REGION 1..13: note = Table B: HLA-DRB1*08:04L HLA-DRB1*11:02L HLA-DRB1*11:01L HLA-DPA1*01:03-B1*104:01L
  source 1..13: note = Severe acute respiratory syndrome coronavirus 2
DNYITTYPGQGLN

SEQ ID NO: 20203 - protein, 12 aa, Severe acute respiratory syndrome-related coronavirus
  REGION 1..12: note = Table B: HLA-DRB1*08:04L HLA-DPA1*01:03-B1*03:01L HLA-DRB1*11:02L HLA-DRB1*11:01L HLA-DPA1*01:03-B1*04:01L HLA-DPA1*01:03-B1*04:02L HLA-DRB3*01:01L HLA-DPA1*02:01-B1*13:01L
  source 1..12: note = Severe acute respiratory syndrome coronavirus 2
YITTYPGQGLNG

SEQ ID NO: 20204 - protein, 16 aa, Severe acute respiratory syndrome-related coronavirus
  REGION 1..16: note = Table B: HLA-DRB1*08:04L HLA-DRB1*08:77L HLA-DRB3*02:01L HLA-DRB1*14:01L HLA-DRB1*11:03L HLA-DRB1*11:04L HLA-DRB1*14:02L HLA-DPA1*01:03-B1*04:01L HLA-DRB1*09:01L HLA-DRB1*12:02L HLA-DRB3*01:01L HLA-DPA1*01:03-B1*02:01L HLA-DRB1*07:01L
  REGION 1..16: note = CONT. FROM ABOVE: HLA-DRB1*10:01L HLA-DRB1*08:03L HLA-DRB1*15:01 L
  source 1..16: note = Severe acute respiratory syndrome coronavirus 2
YPGQGLNGYTVEEAKT

SEQ ID NO: 20205 - protein, 13 aa, Severe acute respiratory syndrome-related coronavirus
  REGION 1..13: note = Table B: HLA-DRB1*08:04L
  source 1..13: note = Severe acute respiratory syndrome coronavirus 2
IQEGVVDYGARFY

SEQ ID NO: 20206 - protein, 11 aa, Severe acute respiratory syndrome-related coronavirus
  REGION 1..11: note = Table B: HLA-DRB1*08:04L HLA-DRB3*02:01L HLA-DQA1*01:01-B1*05:01L HLA-DRB1*11:01L HLA-DPA1*02:01-B1*13:01L HLA-DPA1*01:03-B1*104:01L HLA-DQA1*05:05-B1*03:01L HLA-DQA1*01:03-B1*06:01L
  REGION 1..11: note = CONT. FROM ABOVE: HLA-DRB1*08:03L
  source 1..11: note = Severe acute respiratory syndrome coronavirus 2
FYTSKTTVASL

SEQ ID NO: 20207 - protein, 13 aa, Severe acute respiratory syndrome-related coronavirus
  REGION 1..13: note = Table B: HLA-DRB1*08:04L HLA-DQA1*01:01-B1*05:01L HLA-DQA1*05:05-B1*03:19L HLA-DRB1*04:08L
  source 1..13: note = Severe acute respiratory syndrome coronavirus 2
VTMPLGYVTHGLN

SEQ ID NO: 20208 - protein, 13 aa, Severe acute respiratory syndrome-related coronavirus
  REGION 1..13: note = Table B: HLA-DRB1*08:04L
  source 1..13: note = Severe acute respiratory syndrome coronavirus 2
MPLGYVTHGLNLE

SEQ ID NO: 20209 - protein, 17 aa, Severe acute respiratory syndrome-related coronavirus
  REGION 1..17: note = Table B: HLA-DRB1*08:04L HLA-DRB3*02:01L
  source 1..17: note = Severe acute respiratory syndrome coronavirus 2
VPATVSVSSPDAVTAYN

SEQ ID NO: 20210 - protein, 14 aa, Severe acute respiratory syndrome-related coronavirus
  REGION 1..14: note = Table B: HLA-DRB1*08:04L HLA-DRB1*12:01L
  source 1..14: note = Severe acute respiratory syndrome coronavirus 2
YKDWSYSGQSTQLG

SEQ ID NO: 20211 - protein, 13 aa, Severe acute respiratory syndrome-related coronavirus
  REGION 1..13: note = Table B: HLA-DRB1*08:04L HLA-DPA1*01:03-B1*03:01L HLA-DRB1*09:01L HLA-DQA1*05:05-B1*03:01L HLA-DRB1*07:01L HLA-DRB1*04:08L
  source 1..13: note = Severe acute respiratory syndrome coronavirus 2
DKSVYYTSNPTTF

SEQ ID NO: 20212 - protein, 12 aa, Severe acute respiratory syndrome-related coronavirus
  REGION 1..12: note = Table B: HLA-DRB1*08:04L HLA-DRB1*11:03L HLA-DRB1*11:04L HLA-DQA1*01:01-B1*05:01L HLA-DRB1*12:02L HLA-DRB3*01:01L HLA-DRB1*15:01L
  source 1..12: note = Severe acute respiratory syndrome coronavirus 2
GEVITFDNLKTL

SEQ ID NO: 20213 - protein, 12 aa, Severe acute respiratory syndrome-related coronavirus
  REGION 1..12: note = Table B: HLA-DRB1*08:04L
  source 1..12: note = Severe acute respiratory syndrome coronavirus 2
ITFDNLKTLLSL

SEQ ID NO: 20214 - protein, 13 aa, Severe acute respiratory syndrome-related coronavirus
  REGION 1..13: note = Table B: HLA-DRB1*08:04L
  source 1..13: note = Severe acute respiratory syndrome coronavirus 2
TIKVFTTVDNINL

SEQ ID NO: 20215 - protein, 12 aa, Severe acute respiratory syndrome-related coronavirus
  REGION 1..12: note = Table B: HLA-DRB1*08:04L HLA-DRB1*08:01L
  source 1..12: note = Severe acute respiratory syndrome coronavirus 2
DNINLHTQVVDM

SEQ ID NO: 20216 - protein, 12 aa, Severe acute respiratory syndrome-related coronavirus
  REGION 1..12: note = Table B: HLA-DRB1*08:04L HLA-DRB3*02:01L HLA-DRB1*08:01L HLA-DQA1*05:05-B1*03:19L HLA-DRB3*01:01L HLA-DRB1*08:03L
  source 1..12: note = Severe acute respiratory syndrome coronavirus 2
NINLHTQVVDMS

SEQ ID NO: 20217 - protein, 12 aa, Severe acute respiratory syndrome-related coronavirus
  REGION 1..12: note = Table B: HLA-DRB1*08:04L HLA-DRB3*02:01L HLA-DRB1*14:02L HLA-DQA1*05:05-B1*03:19L HLA-DPA1*01:03-B1*04:01L HLA-DPA1*01:03-B1*04:02L
  source 1..12: note = Severe acute respiratory syndrome coronavirus 2
INLHTQVVDMSM

SEQ ID NO: 20218 - protein, 13 aa, Severe acute respiratory syndrome-related coronavirus
  REGION 1..13: note = Table B: HLA-DRB1*08:04L
  source 1..13: note = Severe acute respiratory syndrome coronavirus 2
AFEYYHTTDPSFL

SEQ ID NO: 20219 - protein, 12 aa, Severe acute respiratory syndrome-related coronavirus
  REGION 1..12: note = Table B: HLA-DRB1*08:04L HLA-DRB1*04:10L HLA-DRB1*14:54L
  source 1..12: note = Severe acute respiratory syndrome coronavirus 2
EYYHTTDPSFLG

SEQ ID NO: 20220 - protein, 15 aa, Severe acute respiratory syndrome-related coronavirus
  REGION 1..15: note = Table B: HLA-DRB1*08:04L
  source 1..15: note = Severe acute respiratory syndrome coronavirus 2
LTSIKWADNNCYLAT

SEQ ID NO: 20221 - protein, 13 aa, Severe acute respiratory syndrome-related coronavirus
  REGION 1..13: note = Table B: HLA-DRB1*08:04L HLA-DRB1*14:01L HLA-DRB1*08:01L HLA-DPA1*03:01-B1*105:01L HLA-DQA1*01:03-B1*06:01L
  source 1..13: note = Severe acute respiratory syndrome coronavirus 2
ILAYCNKTVGELG

SEQ ID NO: 20222 - protein, 12 aa, Severe acute respiratory syndrome-related coronavirus
  REGION 1..12: note = Table B: HLA-DRB1*08:04L HLA-DPA1*01:03-B1*04:02L HLA-DRB1*07:01L HLA-DRB1*10:01L HLA-DRB1*04:08L
  source 1..12: note = Severe acute respiratory syndrome coronavirus 2
KYLVQQESPFVM

SEQ ID NO: 20223 - protein, 16 aa, Severe acute respiratory syndrome-related coronavirus
  REGION 1..16: note = Table B: HLA-DRB1*08:04L HLA-DRB1*14:02L
  source 1..16: note = Severe acute respiratory syndrome coronavirus 2
TGNYQCGHYKHITSKE

SEQ ID NO: 20224 - protein, 13 aa, Severe acute respiratory syndrome-related coronavirus
  REGION 1..13: note = Table B: HLA-DRB1*08:04L HLA-DRB1*04:10L HLA-DPA1*02:01-B1*13:01L HLA-DRB1*04:08L HLA-DRB1*08:03L
  source 1..13: note = Severe acute respiratory syndrome coronavirus 2
TTTIKPVTYKLDG

SEQ ID NO: 20225 - protein, 18 aa, Severe acute respiratory syndrome-related coronavirus
  REGION 1..18: note = Table B: HLA-DRB1*08:04L HLA-DPA1*01:03-B1*03:01L HLA-DPA1*02:01-B1*13:01L
  source 1..18: note = Severe acute respiratory syndrome coronavirus 2
IKPVTYKLDGVVCTEIDP

SEQ ID NO: 20226 - protein, 15 aa, Severe acute respiratory syndrome-related coronavirus
  REGION 1..15: note = Table B: HLA-DRB1*08:04L HLA-DPA1*03:01-B1*04:02L HLA-DPA1*01:03-B1*04:02L
  source 1..15: note = Severe acute respiratory syndrome coronavirus 2
LDGVVCTEIDPKLDN

SEQ ID NO: 20227 - protein, 15 aa, Severe acute respiratory syndrome-related coronavirus
  REGION 1..15: note = Table B: HLA-DRB1*08:04L
  source 1..15: note = Severe acute respiratory syndrome coronavirus 2
NFKFVCDNIKFADDL

SEQ ID NO: 20228 - protein, 15 aa, Severe acute respiratory syndrome-related coronavirus
  REGION 1..15: note = Table B: HLA-DRB1*08:04L HLA-DPA1*02:01-B1*13:01L
  source 1..15: note = Severe acute respiratory syndrome coronavirus 2
FKFVCDNIKFADDLN

SEQ ID NO: 20229 - protein, 14 aa, Severe acute respiratory syndrome-related coronavirus
  REGION 1..14: note = Table B: HLA-DRB1*08:04L HLA-DPA1*01:03-B1*02:01L
  source 1..14: note = Severe acute respiratory syndrome coronavirus 2
RELKVTFFPDLNGD

SEQ ID NO: 20230 - protein, 13 aa, Severe acute respiratory syndrome-related coronavirus
  REGION 1..13: note = Table B: HLA-DRB1*08:04L HLA-DRB1*08:03L HLA-DRB1*15:03L
  source 1..13: note = Severe acute respiratory syndrome coronavirus 2
YKHYTPSFKKGAK

SEQ ID NO: 20231 - protein, 14 aa, Severe acute respiratory syndrome-related coronavirus
  REGION 1..14: note = Table B: HLA-DRB1*08:04L HLA-DRB1*08:01L HLA-DRB1*04:08L
  source 1..14: note = Severe acute respiratory syndrome coronavirus 2
LWSTKPVETSNSFD

SEQ ID NO: 20232 - protein, 13 aa, Severe acute respiratory syndrome-related coronavirus
  REGION 1..13: note = Table B: HLA-DRB1*08:04L HLA-DRB1*08:01L HLA-DPA1*01:03-B1*04:01L HLA-DPA1*01:03-B1*04:02L HLA-DRB3*01:01L HLA-DPA1*01:03-B1*104:01L HLA-DRB1*08:03L
  source 1..13: note = Severe acute respiratory syndrome coronavirus 2
FDVLKSEDAQGMD

SEQ ID NO: 20233 - protein, 14 aa, Severe acute respiratory syndrome-related coronavirus
  REGION 1..14: note = Table B: HLA-DRB1*08:04L HLA-DPA1*03:01-B1*105:01L HLA-DRB1*15:03L
  source 1..14: note = Severe acute respiratory syndrome coronavirus 2
KDVLECNVKTTEVV

SEQ ID NO: 20234 - protein, 15 aa, Severe acute respiratory syndrome-related coronavirus
  REGION 1..15: note = Table B: HLA-DRB1*08:04L
  source 1..15: note = Severe acute respiratory syndrome coronavirus 2
TTEVVGDIILKPANN

SEQ ID NO: 20235 - protein, 12 aa, Severe acute respiratory syndrome-related coronavirus
  REGION 1..12: note = Table B: HLA-DRB1*08:04L HLA-DRB1*11:03L HLA-DRB1*11:04L HLA-DRB1*04:10L HLA-DRB1*12:02L HLA-DQA1*05:05-B1*03:01L HLA-DRB1*04:08L HLA-DRB1*08:03L
  source 1..12: note = Severe acute respiratory syndrome coronavirus 2
GDIILKPANNSL

SEQ ID NO: 20236 - protein, 14 aa, Severe acute respiratory syndrome-related coronavirus
  REGION 1..14: note = Table B: HLA-DRB1*08:04L HLA-DRB3*02:01L
  source 1..14: note = Severe acute respiratory syndrome coronavirus 2
NNSLKITEEVGHTD

SEQ ID NO: 20237 - protein, 14 aa, Severe acute respiratory syndrome-related coronavirus
  REGION 1..14: note = Table B: HLA-DRB1*08:04L HLA-DRB1*08:01L HLA-DPA1*01:03-B1*04:02L HLA-DPA1*01:02-B1*04:01L
  source 1..14: note = Severe acute respiratory syndrome coronavirus 2
HTDLMAAYVDNSSL

SEQ ID NO: 20238 - protein, 15 aa, Severe acute respiratory syndrome-related coronavirus
  REGION 1..15: note = Table B: HLA-DRB1*08:04L HLA-DPA1*01:03-B1*104:01L
  source 1..15: note = Severe acute respiratory syndrome coronavirus 2
NSRIKASMPTTIAKN

SEQ ID NO: 20239 - protein, 14 aa, Severe acute respiratory syndrome-related coronavirus
  REGION 1..14: note = Table B: HLA-DRB1*08:04L HLA-DRB1*08:77L HLA-DRB1*11:03L HLA-DRB1*09:01L HLA-DRB3*01:01L HLA-DRB1*07:01L HLA-DRB1*04:08L
  source 1..14: note = Severe acute respiratory syndrome coronavirus 2
MPTTIAKNTVKSVG

SEQ ID NO: 20240 - protein, 14 aa, Severe acute respiratory syndrome-related coronavirus
  REGION 1..14: note = Table B: HLA-DRB1*08:04L HLA-DPA1*01:03-B1*02:01L HLA-DPA1*01:03-B1*104:01L
  source 1..14: note = Severe acute respiratory syndrome coronavirus 2
FNYLKSPNFSKLIN

SEQ ID NO: 20241 - protein, 13 aa, Severe acute respiratory syndrome-related coronavirus
  REGION 1..13: note = Table B: HLA-DRB1*08:04L HLA-DRB1*08:01L HLA-DRB1*11:01L HLA-DQA1*01-B1*05L HLA-DQA1*05:01-B1*02:01L HLA-DPA1*02:01-B1*13:01L HLA-DPA1*01:03-B1*104:01L HLA-DQA1*01:03-B1*06:01L
  source 1..13: note = Severe acute respiratory syndrome coronavirus 2
SFKWDLTAFGLVA

SEQ ID NO: 20242 - protein, 12 aa, Severe acute respiratory syndrome-related coronavirus
  REGION 1..12: note = Table B: HLA-DRB1*08:04L HLA-DRB1*04:08L
  source 1..12: note = Severe acute respiratory syndrome coronavirus 2
YFAVHFISNSWL

SEQ ID NO: 20243 - protein, 12 aa, Severe acute respiratory syndrome-related coronavirus
  REGION 1..12: note = Table B: HLA-DRB1*08:04L HLA-DRB1*12:01L
  source 1..12: note = Severe acute respiratory syndrome coronavirus 2
APISAMVRMYIF

SEQ ID NO: 20244 - protein, 15 aa, Severe acute respiratory syndrome-related coronavirus
  REGION 1..15: note = Table B: HLA-DRB1*08:04L
  source 1..15: note = Severe acute respiratory syndrome coronavirus 2
WKSYVHVVDGCNSST

SEQ ID NO: 20245 - protein, 13 aa, Severe acute respiratory syndrome-related coronavirus
  REGION 1..13: note = Table B: HLA-DRB1*08:04L HLA-DRB1*11:03L HLA-DRB3*01:01L
  source 1..13: note = Severe acute respiratory syndrome coronavirus 2
ISDEVARDLSLQF

SEQ ID NO: 20246 - protein, 14 aa, Severe acute respiratory syndrome-related coronavirus
  REGION 1..14: note = Table B: HLA-DRB1*08:04L
  source 1..14: note = Severe acute respiratory syndrome coronavirus 2
IHLYFDKAGQKTYE

SEQ ID NO: 20247 - protein, 16 aa, Severe acute respiratory syndrome-related coronavirus
  REGION 1..16: note = Table B: HLA-DRB1*08:04L HLA-DPA1*01:03-B1*03:01L
  source 1..16: note = Severe acute respiratory syndrome coronavirus 2
AGQKTYERHSLSHFVN

SEQ ID NO: 20248 - protein, 18 aa, Severe acute respiratory syndrome-related coronavirus
  REGION 1..18: note = Table B: HLA-DRB1*08:04L HLA-DPA1*03:01-B1*04:02L HLA-DRB1*14:02L HLA-DQA1*05:05-B1*03:19L HLA-DQA1*05:01-B1*02:01L HLA-DPA1*01:03-B1*04:02L HLA-DPA1*01:03-B1*104:01L
  source 1..18: note = Severe acute respiratory syndrome coronavirus 2
GQKTYERHSLSHFVNLDN

SEQ ID NO: 20249 - protein, 14 aa, Severe acute respiratory syndrome-related coronavirus
  REGION 1..14: note = Table B: HLA-DRB1*08:04L
  source 1..14: note = Severe acute respiratory syndrome coronavirus 2
DSAEVAVKMFDAYV

SEQ ID NO: 20250 - protein, 14 aa, Severe acute respiratory syndrome-related coronavirus
  REGION 1..14: note = Table B: HLA-DRB1*08:04L
  source 1..14: note = Severe acute respiratory syndrome coronavirus 2
AEVAVKMFDAYVNT

SEQ ID NO: 20251 - protein, 14 aa, Severe acute respiratory syndrome-related coronavirus
  REGION 1..14: note = Table B: HLA-DRB1*08:04L HLA-DRB1*15:01L
  source 1..14: note = Severe acute respiratory syndrome coronavirus 2
VAVKMFDAYVNTFS

SEQ ID NO: 20252 - protein, 13 aa, Severe acute respiratory syndrome-related coronavirus
  REGION 1..13: note = Table B: HLA-DRB1*08:04L HLA-DRB1*08:01L HLA-DPA1*01:03-B1*04:02L HLA-DPA1*01:03-B1*104:01L
  source 1..13: note = Severe acute respiratory syndrome coronavirus 2
FDAYVNTFSSTFN

SEQ ID NO: 20253 - protein, 13 aa, Severe acute respiratory syndrome-related coronavirus
  REGION 1..13: note = Table B: HLA-DRB1*08:04L HLA-DRB1*10:01L
  source 1..13: note = Severe acute respiratory syndrome coronavirus 2
VATAEAELAKNVS

SEQ ID NO: 20254 - protein, 12 aa, Severe acute respiratory syndrome-related coronavirus
  REGION 1..12: note = Table B: HLA-DRB1*08:04L HLA-DRB1*14:54L
  source 1..12: note = Severe acute respiratory syndrome coronavirus 2
LSTFISAARQGF

SEQ ID NO: 20255 - protein, 15 aa, Severe acute respiratory syndrome-related coronavirus
  REGION 1..15: note = Table B: HLA-DRB1*08:04L HLA-DRB1*14:01L
  source 1..15: note = Severe acute respiratory syndrome coronavirus 2
VDSDVETKDVVECLK

SEQ ID NO: 20256 - protein, 13 aa, Severe acute respiratory syndrome-related coronavirus
  REGION 1..13: note = Table B: HLA-DRB1*08:04L HLA-DRB1*11:04L HLA-DRB1*11:01L HLA-DRB1*04:08L
  source 1..13: note = Severe acute respiratory syndrome coronavirus 2
KDVVECLKLSHQS

SEQ ID NO: 20257 - protein, 13 aa, Severe acute respiratory syndrome-related coronavirus
  REGION 1..13: note = Table B: HLA-DRB1*08:04L HLA-DRB1*14:01L HLA-DRB1*08:01L HLA-DPA1*03:01-B1*105:01L HLA-DRB1*04:08L
  source 1..13: note = Severe acute respiratory syndrome coronavirus 2
DVVECLKLSHQSD

SEQ ID NO: 20258 - protein, 16 aa, Severe acute respiratory syndrome-related coronavirus
  REGION 1..16: note = Table B: HLA-DRB1*08:04L
  source 1..16: note = Severe acute respiratory syndrome coronavirus 2
INAQVAKSHNIALIWN

SEQ ID NO: 20259 - protein, 13 aa, Severe acute respiratory syndrome-related coronavirus
  REGION 1..13: note = Table B: HLA-DRB1*08:04L HLA-DPA1*01:03-B1*02:01L
  source 1..13: note = Severe acute respiratory syndrome coronavirus 2
ALIWNVKDFMSLS

SEQ ID NO: 20260 - protein, 14 aa, Severe acute respiratory syndrome-related coronavirus
  REGION 1..14: note = Table B: HLA-DRB1*08:04L HLA-DQA1*05:05-B1*03:01L
  source 1..14: note = Severe acute respiratory syndrome coronavirus 2
VVNVVTTKIALKGG

SEQ ID NO: 20261 - protein, 15 aa, Severe acute respiratory syndrome-related coronavirus
  REGION 1..15: note = Table B: HLA-DRB1*08:04L
  source 1..15: note = Severe acute respiratory syndrome coronavirus 2
VNVVTTKIALKGGKI

SEQ ID NO: 20262 - protein, 13 aa, Severe acute respiratory syndrome-related coronavirus
  REGION 1..13: note = Table B: HLA-DRB1*08:04L HLA-DQA1*05:05-B1*03:01L
  source 1..13: note = Severe acute respiratory syndrome coronavirus 2
VAAIFYLITPVHV

SEQ ID NO: 20263 - protein, 13 aa, Severe acute respiratory syndrome-related coronavirus
  REGION 1..13: note = Table B: HLA-DRB1*08:04L HLA-DPA1*02:01-B1*13:01L HLA-DPA1*01:02-B1*04:01L
  source 1..13: note = Severe acute respiratory syndrome coronavirus 2
SSEIIGYKAIDGG

SEQ ID NO: 20264 - protein, 13 aa, Severe acute respiratory syndrome-related coronavirus
  REGION 1..13: note = Table B: HLA-DRB1*08:04L HLA-DRB1*11:02L HLA-DRB1*11:03L HLA-DRB1*14:17L HLA-DRB1*04:08L
  source 1..13: note = Severe acute respiratory syndrome coronavirus 2
DFDTWFSQRGGSY

SEQ ID NO: 20265 - protein, 12 aa, Severe acute respiratory syndrome-related coronavirus
  REGION 1..12: note = Table B: HLA-DRB1*08:04L HLA-DPA1*03:01-B1*04:02L HLA-DRB1*14:01L HLA-DRB1*08:01L HLA-DRB1*12:01L HLA-DRB1*04:08L
  source 1..12: note = Severe acute respiratory syndrome coronavirus 2
GDFLHFLPRVFS

SEQ ID NO: 20266 - protein, 12 aa, Severe acute respiratory syndrome-related coronavirus
  REGION 1..12: note = Table B: HLA-DRB1*08:04L HLA-DRB1*11:04L HLA-DRB1*08:01L HLA-DRB1*11:01L HLA-DRB1*04:08L
  source 1..12: note = Severe acute respiratory syndrome coronavirus 2
DFLHFLPRVFSA

SEQ ID NO: 20267 - protein, 15 aa, Severe acute respiratory syndrome-related coronavirus
  REGION 1..15: note = Table B: HLA-DRB1*08:04L
  source 1..15: note = Severe acute respiratory syndrome coronavirus 2
GNICYTPSKLIEYTD

SEQ ID NO: 20268 - protein, 14 aa, Severe acute respiratory syndrome-related coronavirus
  REGION 1..14: note = Table B: HLA-DRB1*08:04L HLA-DPA1*01:03-B1*03:01L HLA-DRB1*14:02L HLA-DPA1*01:03-B1*04:01L HLA-DPA1*01:03-B1*02:01L HLA-DPA1*01:03-B1*104:01L HLA-DRB1*07:01L HLA-DRB1*08:03L
  source 1..14: note = Severe acute respiratory syndrome coronavirus 2
IIQFPNTYLEGSVR

SEQ ID NO: 20269 - protein, 14 aa, Severe acute respiratory syndrome-related coronavirus
  REGION 1..14: note = Table B: HLA-DRB1*08:04L HLA-DRB3*02:01L HLA-DRB1*14:01L HLA-DRB1*04:10L HLA-DRB1*09:01L HLA-DRB1*07:01L
  source 1..14: note = Severe acute respiratory syndrome coronavirus 2
FPNTYLEGSVRVVT

SEQ ID NO: 20270 - protein, 13 aa, Severe acute respiratory syndrome-related coronavirus
  REGION 1..13: note = Table B: HLA-DRB1*08:04L HLA-DQA1*01:01-B1*05:01L HLA-DRB1*08:01L HLA-DRB1*09:01L HLA-DRB3*01:01L HLA-DPA1*01:03-B1*02:01L HLA-DRB1*07:01L HLA-DRB1*08:03L
  source 1..13: note = Severe acute respiratory syndrome coronavirus 2
GSVRVVTTFDSEY

SEQ ID NO: 20271 - protein, 13 aa, Severe acute respiratory syndrome-related coronavirus
  REGION 1..13: note = Table B: HLA-DRB1*08:04L HLA-DRB1*04:08L
  source 1..13: note = Severe acute respiratory syndrome coronavirus 2
LNNDYYRSLPGVF

SEQ ID NO: 20272 - protein, 12 aa, Severe acute respiratory syndrome-related coronavirus
  REGION 1..12: note = Table B: HLA-DRB1*08:04L HLA-DPA1*01:02-B1*04:01L
  source 1..12: note = Severe acute respiratory syndrome coronavirus 2
YFSGAMDTTSYR

SEQ ID NO: 20273 - protein, 13 aa, Severe acute respiratory syndrome-related coronavirus
  REGION 1..13: note = Table B: HLA-DRB1*08:04L HLA-DRB3*02:01L HLA-DRB1*11:03L HLA-DRB1*12:02L HLA-DPA1*02:01-B1*13:01L HLA-DRB1*07:01L
  source 1..13: note = Severe acute respiratory syndrome coronavirus 2
FSGAMDTTSYREA

SEQ ID NO: 20274 - protein, 13 aa, Severe acute respiratory syndrome-related coronavirus
  REGION 1..13: note = Table B: HLA-DRB1*08:04L HLA-DRB1*08:01L
  source 1..13: note = Severe acute respiratory syndrome coronavirus 2
SGAMDTTSYREAA

SEQ ID NO: 20275 - protein, 14 aa, Severe acute respiratory syndrome-related coronavirus
  REGION 1..14: note = Table B: HLA-DRB1*08:04L HLA-DRB1*11:03L HLA-DRB1*11:04L HLA-DQA1*01:01-B1*05:01L
  source 1..14: note = Severe acute respiratory syndrome coronavirus 2
GSDVLYQPPQTSIT

SEQ ID NO: 20276 - protein, 13 aa, Severe acute respiratory syndrome-related coronavirus
  REGION 1..13: note = Table B: HLA-DRB1*08:04L HLA-DRB1*11:04L HLA-DRB1*11:01L
  source 1..13: note = Severe acute respiratory syndrome coronavirus 2
DDVVYCPRHVICT

SEQ ID NO: 20277 - protein, 13 aa, Severe acute respiratory syndrome-related coronavirus
  REGION 1..13: note = Table B: HLA-DRB1*08:04L HLA-DRB1*11:01L HLA-DRB3*01:01L
  source 1..13: note = Severe acute respiratory syndrome coronavirus 2
HNFLVQAGNVQLR

SEQ ID NO: 20278 - protein, 16 aa, Severe acute respiratory syndrome-related coronavirus
  REGION 1..16: note = Table B: HLA-DRB1*08:04L HLA-DRB1*14:02L HLA-DRB1*07:01L HLA-DRB1*08:03L
  source 1..16: note = Severe acute respiratory syndrome coronavirus 2
EGNFYGPFVDRQTAQA

SEQ ID NO: 20279 - protein, 13 aa, Severe acute respiratory syndrome-related coronavirus
  REGION 1..13: note = Table B: HLA-DRB1*08:04L
  source 1..13: note = Severe acute respiratory syndrome coronavirus 2
YGPFVDRQTAQAA

SEQ ID NO: 20280 - protein, 15 aa, Severe acute respiratory syndrome-related coronavirus
  REGION 1..15: note = Table B: HLA-DRB1*08:04L HLA-DPA1*01:03-B1*03:01L HLA-DPA1*01:03-B1*04:01L HLA-DPA1*01:03-B1*04:02L HLA-DPA1*02:01-B1*13:01L
  source 1..15: note = Severe acute respiratory syndrome coronavirus 2
AAVINGDRWFLNRFT

SEQ ID NO: 20281 - protein, 14 aa, Severe acute respiratory syndrome-related coronavirus
  REGION 1..14: note = Table B: HLA-DRB1*08:04L HLA-DRB1*14:02L HLA-DRB1*08:01L
  source 1..14: note = Severe acute respiratory syndrome coronavirus 2
WFLNRFTTTLNDFN

SEQ ID NO: 20282 - protein, 14 aa, Severe acute respiratory syndrome-related coronavirus
  REGION 1..14: note = Table B: HLA-DRB1*08:04L HLA-DPA1*01:03-B1*02:01L HLA-DRB1*08:02L
  source 1..14: note = Severe acute respiratory syndrome coronavirus 2
TLVYKVYYGNALDQ

SEQ ID NO: 20283 - protein, 13 aa, Severe acute respiratory syndrome-related coronavirus
  REGION 1..13: note = Table B: HLA-DRB1*08:04L HLA-DPA1*01:03-B1*04:01L HLA-DPA1*01:03-B1*04:02L HLA-DRB1*12:02L HLA-DRB1*14:54L HLA-DPA1*01:03-B1*104:01L
  source 1..13: note = Severe acute respiratory syndrome coronavirus 2
VYKVYYGNALDQA

SEQ ID NO: 20284 - protein, 12 aa, Severe acute respiratory syndrome-related coronavirus
  REGION 1..12: note = Table B: HLA-DRB1*08:04L HLA-DRB1*08:01L HLA-DRB1*12:02L HLA-DRB1*14:54L
  source 1..12: note = Severe acute respiratory syndrome coronavirus 2
TTVMFLARGIVF

SEQ ID NO: 20285 - protein, 15 aa, Severe acute respiratory syndrome-related coronavirus
  REGION 1..15: note = Table B: HLA-DRB1*08:04L HLA-DPA1*03:01-B1*04:02L HLA-DPA1*01:03-B1*04:02L HLA-DPA1*01:03-B1*02:01L HLA-DPA1*01:02-B1*04:01L HLA-DQA1*01:03-B1*06:01L
  source 1..15: note = Severe acute respiratory syndrome coronavirus 2
RLTLGVYDYLVSTQE

SEQ ID NO: 20286 - protein, 11 aa, Severe acute respiratory syndrome-related coronavirus
  REGION 1..11: note = Table B: HLA-DRB1*08:04L HLA-DRB1*14:01L
  source 1..11: note = Severe acute respiratory syndrome coronavirus 2
FKLNIKLLGVG

SEQ ID NO: 20287 - protein, 13 aa, Severe acute respiratory syndrome-related coronavirus
  REGION 1..13: note = Table B: HLA-DRB1*08:04L HLA-DPA1*01:03-B1*03:01L HLA-DQA1*05:05-B1*03:19L HLA-DRB1*04:10L HLA-DRB1*10:01L
  source 1..13: note = Severe acute respiratory syndrome coronavirus 2
TSVVLLSVLQQLR

SEQ ID NO: 20288 - protein, 14 aa, Severe acute respiratory syndrome-related coronavirus
  REGION 1..14: note = Table B: HLA-DRB1*08:04L
  source 1..14: note = Severe acute respiratory syndrome coronavirus 2
SVVLLSVLQQLRVE

SEQ ID NO: 20289 - protein, 15 aa, Severe acute respiratory syndrome-related coronavirus
  REGION 1..15: note = Table B: HLA-DRB1*08:04L HLA-DRB1*03:01L HLA-DRB1*11:02L HLA-DRB1*09:01L HLA-DPA1*01:03-B1*04:02L HLA-DPA1*01:03-B1*104:01L HLA-DRB1*08:02L HLA-DRB1*08:03L
  source 1..15: note = Severe acute respiratory syndrome coronavirus 2
LQQLRVESSSKLWAQ

SEQ ID NO: 20290 - protein, 13 aa, Severe acute respiratory syndrome-related coronavirus
  REGION 1..13: note = Table B: HLA-DRB1*08:04L HLA-DPA1*03:01-B1*105:01L
  source 1..13: note = Severe acute respiratory syndrome coronavirus 2
SKLWAQCVQLHND

SEQ ID NO: 20291 - protein, 14 aa, Severe acute respiratory syndrome-related coronavirus
  REGION 1..14: note = Table B: HLA-DRB1*08:04L
  source 1..14: note = Severe acute respiratory syndrome coronavirus 2
KLWAQCVQLHNDIL

SEQ ID NO: 20292 - protein, 14 aa, Severe acute respiratory syndrome-related coronavirus
  REGION 1..14: note = Table B: HLA-DRB1*08:04L
  source 1..14: note = Severe acute respiratory syndrome coronavirus 2
EMLDNRATLQAIAS

SEQ ID NO: 20293 - protein, 14 aa, Severe acute respiratory syndrome-related coronavirus
  REGION 1..14: note = Table B: HLA-DRB1*08:04L
  source 1..14: note = Severe acute respiratory syndrome coronavirus 2
KSLNVAKSEFDRDA

SEQ ID NO: 20294 - protein, 14 aa, Severe acute respiratory syndrome-related coronavirus
  REGION 1..14: note = Table B: HLA-DRB1*08:04L HLA-DRB1*08:03L HLA-DRB1*15:01L
  source 1..14: note = Severe acute respiratory syndrome coronavirus 2
QRKLEKMADQAMTQ

SEQ ID NO: 20295 - protein, 12 aa, Severe acute respiratory syndrome-related coronavirus
  REGION 1..12: note = Table B: HLA-DRB1*08:04L HLA-DRB1*14:01L HLA-DRB1*16:01L HLA-DRB1*15:03L
  source 1..12: note = Severe acute respiratory syndrome coronavirus 2
FTMLRKLDNDAL

SEQ ID NO: 20296 - protein, 13 aa, Severe acute respiratory syndrome-related coronavirus
  REGION 1..13: note = Table B: HLA-DRB1*08:04L HLA-DRB1*08:77L HLA-DPA1*01:03-B1*03:01L HLA-DRB1*11:03L HLA-DPA1*02:01-B1*13:01L HLA-DRB1*07:01L HLA-DRB1*10:01L
  source 1..13: note = Severe acute respiratory syndrome coronavirus 2
DALNNIINNARDG

SEQ ID NO: 20297 - protein, 15 aa, Severe acute respiratory syndrome-related coronavirus
  REGION 1..15: note = Table B: HLA-DRB1*08:04L
  source 1..15: note = Severe acute respiratory syndrome coronavirus 2
IIPLTTAAKLMVVIP

SEQ ID NO: 20298 - protein, 12 aa, Severe acute respiratory syndrome-related coronavirus
  REGION 1..12: note = Table B: HLA-DRB1*08:04L HLA-DRB3*02:01L HLA-DRB1*11:03L HLA-DRB1*11:04L HLA-DRB1*12:02L HLA-DRB3*01:01L
  source 1..12: note = Severe acute respiratory syndrome coronavirus 2
MVVIPDYNTYKN

SEQ ID NO: 20299 - protein, 12 aa, Severe acute respiratory syndrome-related coronavirus
  REGION 1..12: note = Table B: HLA-DRB1*08:04L HLA-DRB1*11:03L
  source 1..12: note = Severe acute respiratory syndrome coronavirus 2
VTALRANSAVKL

SEQ ID NO: 20300 - protein, 13 aa, Severe acute respiratory syndrome-related coronavirus
  REGION 1..13: note = Table B: HLA-DRB1*08:04L HLA-DRB1*11:04L HLA-DQA1*05:05-B1*03:01L HLA-DRB1*10:01L HLA-DRB1*08:03L
  source 1..13: note = Severe acute respiratory syndrome coronavirus 2
NSAVKLQNNELSP

SEQ ID NO: 20301 - protein, 13 aa, Severe acute respiratory syndrome-related coronavirus
  REGION 1..13: note = Table B: HLA-DRB1*08:04L HLA-DPA1*03:01-B1*04:02L HLA-DRB1*11:03L HLA-DRB1*10:01L HLA-DRB1*15:01L
  source 1..13: note = Severe acute respiratory syndrome coronavirus 2
DNALAYYNTTKGG

SEQ ID NO: 20302 - protein, 11 aa, Severe acute respiratory syndrome-related coronavirus
  REGION 1..11: note = Table B: HLA-DRB1*08:04L HLA-DRB1*11:04L HLA-DRB1*09:01L HLA-DRB1*12:02L HLA-DRB3*01:01L HLA-DRB1*14:54L HLA-DPA1*01:03-B1*104:01L
  source 1..11: note = Severe acute respiratory syndrome coronavirus 2
YYNTTKGGRFV

SEQ ID NO: 20303 - protein, 14 aa, Severe acute respiratory syndrome-related coronavirus
  REGION 1..14: note = Table B: HLA-DRB1*08:04L
  source 1..14: note = Severe acute respiratory syndrome coronavirus 2
GGRFVLALLSDLQD

SEQ ID NO: 20304 - protein, 14 aa, Severe acute respiratory syndrome-related coronavirus
  REGION 1..14: note = Table B: HLA-DRB1*08:04L HLA-DPA1*01:03-B1*03:01L HLA-DQA1*01-B1*05L HLA-DQA1*05:01-B1*02:01L HLA-DRB3*01:01L HLA-DQA1*05:05-B1*03:01L
  source 1..14: note = Severe acute respiratory syndrome coronavirus 2
DLQDLKWARFPKSD

SEQ ID NO: 20305 - protein, 12 aa, Severe acute respiratory syndrome-related coronavirus
  REGION 1..12: note = Table B: HLA-DRB1*08:04L HLA-DRB3*01:01L HLA-DQA1*05:05-B1*03:01L
  source 1..12: note = Severe acute respiratory syndrome coronavirus 2
YFIKGLNNLNRG

SEQ ID NO: 20306 - protein, 13 aa, Severe acute respiratory syndrome-related coronavirus
  REGION 1..13: note = Table B: HLA-DRB1*08:04L
  source 1..13: note = Severe acute respiratory syndrome coronavirus 2
VLGSLAATVRLQA

SEQ ID NO: 20307 - protein, 14 aa, Severe acute respiratory syndrome-related coronavirus
  REGION 1..14: note = Table B: HLA-DRB1*08:04L
  source 1..14: note = Severe acute respiratory syndrome coronavirus 2
VLSFCAFAVDAAKA

SEQ ID NO: 20308 - protein, 17 aa, Severe acute respiratory syndrome-related coronavirus
  REGION 1..17: note = Table B: HLA-DRB1*08:04L HLA-DRB1*11:04L HLA-DPA1*01:03-B1*02:01L
  source 1..17: note = Severe acute respiratory syndrome coronavirus 2
VDAAKAYKDYLASGGQP

SEQ ID NO: 20309 - protein, 13 aa, Severe acute respiratory syndrome-related coronavirus
  REGION 1..13: note = Table B: HLA-DRB1*08:04L HLA-DRB1*14:01L
  source 1..13: note = Severe acute respiratory syndrome coronavirus 2
GQPITNCVKMLCT

SEQ ID NO: 20310 - protein, 13 aa, Severe acute respiratory syndrome-related coronavirus
  REGION 1..13: note = Table B: HLA-DRB1*08:04L HLA-DRB1*08:01L
  source 1..13: note = Severe acute respiratory syndrome coronavirus 2
DPVGFTLKNTVCT

SEQ ID NO: 20311 - protein, 13 aa, Severe acute respiratory syndrome-related coronavirus
  REGION 1..13: note = Table B: HLA-DRB1*08:04L HLA-DRB1*11:03L HLA-DRB1*12:02L
  source 1..13: note = Severe acute respiratory syndrome coronavirus 2
YRAFDIYNDKVAG

SEQ ID NO: 20312 - protein, 14 aa, Severe acute respiratory syndrome-related coronavirus
  REGION 1..14: note = Table B: HLA-DRB1*08:04L
  source 1..14: note = Severe acute respiratory syndrome coronavirus 2
RHTFSNYQHEETIY

SEQ ID NO: 20313 - protein, 13 aa, Severe acute respiratory syndrome-related coronavirus
  REGION 1..13: note = Table B: HLA-DRB1*08:04L HLA-DRB1*08:03L
  source 1..13: note = Severe acute respiratory syndrome coronavirus 2
FFKFRIDGDMVPH

SEQ ID NO: 20314 - protein, 12 aa, Severe acute respiratory syndrome-related coronavirus
  REGION 1..12: note = Table B: HLA-DRB1*08:04L HLA-DPA1*01:03-B1*03:01L HLA-DRB1*03:01L HLA-DRB1*14:02L HLA-DPA1*03:01-B1*105:01L
  source 1..12: note = Severe acute respiratory syndrome coronavirus 2
FRIDGDMVPHIS

SEQ ID NO: 20315 - protein, 17 aa, Severe acute respiratory syndrome-related coronavirus
  REGION 1..17: note = Table B: HLA-DRB1*08:04L
  source 1..17: note = Severe acute respiratory syndrome coronavirus 2
DTLKEILVTYNCCDDDY

SEQ ID NO: 20316 - protein, 12 aa, Severe acute respiratory syndrome-related coronavirus
  REGION 1..12: note = Table B: HLA-DRB1*08:04L HLA-DRB1*08:01L HLA-DRB1*08:03L
  source 1..12: note = Severe acute respiratory syndrome coronavirus 2
DDYFNKKDWYDF

SEQ ID NO: 20317 - protein, 13 aa, Severe acute respiratory syndrome-related coronavirus
  REGION 1..13: note = Table B: HLA-DRB1*08:04L HLA-DRB1*08:01L
  source 1..13: note = Severe acute respiratory syndrome coronavirus 2
DYFNKKDWYDFVE

SEQ ID NO: 20318 - protein, 13 aa, Severe acute respiratory syndrome-related coronavirus
  REGION 1..13: note = Table B: HLA-DRB1*08:04L HLA-DRB1*11:03L HLA-DPA1*01:03-B1*04:01L HLA-DRB1*09:01L HLA-DPA1*01:03-B1*104:01L HLA-DRB1*07:01L
  source 1..13: note = Severe acute respiratory syndrome coronavirus 2
DWYDFVENPDILR

SEQ ID NO: 20319 - protein, 14 aa, Severe acute respiratory syndrome-related coronavirus
  REGION 1..14: note = Table B: HLA-DRB1*08:04L
  source 1..14: note = Severe acute respiratory syndrome coronavirus 2
WYDFVENPDILRVY

SEQ ID NO: 20320 - protein, 14 aa, Severe acute respiratory syndrome-related coronavirus
  REGION 1..14: note = Table B: HLA-DRB1*08:04L
  source 1..14: note = Severe acute respiratory syndrome coronavirus 2
YDFVENPDILRVYA

SEQ ID NO: 20321 - protein, 14 aa, Severe acute respiratory syndrome-related coronavirus
  REGION 1..14: note = Table B: HLA-DRB1*08:04L HLA-DRB1*04:08L
  source 1..14: note = Severe acute respiratory syndrome coronavirus 2
DFVENPDILRVYAN

SEQ ID NO: 20322 - protein, 15 aa, Severe acute respiratory syndrome-related coronavirus
  REGION 1..15: note = Table B: HLA-DRB1*08:04L HLA-DRB1*08:01L
  source 1..15: note = Severe acute respiratory syndrome coronavirus 2
TVQFCDAMRNAGIVG

SEQ ID NO: 20323 - protein, 14 aa, Severe acute respiratory syndrome-related coronavirus
  REGION 1..14: note = Table B: HLA-DRB1*08:04L HLA-DPA1*01:03-B1*04:01L HLA-DPA1*01:03-B1*04:02L HLA-DPA1*02:01-B1*13:01L HLA-DPA1*01:03-B1*104:01L
  source 1..14: note = Severe acute respiratory syndrome coronavirus 2
FGDFIQTTPGSGVP

SEQ ID NO: 20324 - protein, 12 aa, Severe acute respiratory syndrome-related coronavirus
  REGION 1..12: note = Table B: HLA-DRB1*08:04L HLA-DRB3*01:01L
  source 1..12: note = Severe acute respiratory syndrome coronavirus 2
ESHVDTDLTKPY

SEQ ID NO: 20325 - protein, 13 aa, Severe acute respiratory syndrome-related coronavirus
  REGION 1..13: note = Table B: HLA-DRB1*08:04L HLA-DRB1*13:01L
  source 1..13: note = Severe acute respiratory syndrome coronavirus 2
SHVDTDLTKPYIK

SEQ ID NO: 20326 - protein, 16 aa, Severe acute respiratory syndrome-related coronavirus
  REGION 1..16: note = Table B: HLA-DRB1*08:04L HLA-DRB1*13:01L
  source 1..16: note = Severe acute respiratory syndrome coronavirus 2
TEERLKLFDRYFKYWD

SEQ ID NO: 20327 - protein, 16 aa, Severe acute respiratory syndrome-related coronavirus
  REGION 1..16: note = Table B: HLA-DRB1*08:04L HLA-DRB1*14:01L HLA-DRB1*08:01L HLA-DRB1*15:03L
  source 1..16: note = Severe acute respiratory syndrome coronavirus 2
FPPTSFGPLVRKIFVD

SEQ ID NO: 20328 - protein, 13 aa, Severe acute respiratory syndrome-related coronavirus
  REGION 1..13: note = Table B: HLA-DRB1*08:04L HLA-DRB1*08:77L HLA-DRB3*02:01L HLA-DPA1*01:03-B1*03:01L HLA-DRB1*03:01L HLA-DRB1*11:04L HLA-DRB1*08:01L
  source 1..13: note = Severe acute respiratory syndrome coronavirus 2
VRKIFVDGVPFVV

SEQ ID NO: 20329 - protein, 11 aa, Severe acute respiratory syndrome-related coronavirus
  REGION 1..11: note = Table B: HLA-DRB1*08:04L HLA-DPA1*01:03-B1*03:01L HLA-DRB1*11:04L HLA-DRB1*12:02L HLA-DRB3*01:01L HLA-DRB1*10:01L
  source 1..11: note = Severe acute respiratory syndrome coronavirus 2
LVYAADPAMHA

SEQ ID NO: 20330 - protein, 12 aa, Severe acute respiratory syndrome-related coronavirus
  REGION 1..12: note = Table B: HLA-DRB1*08:04L HLA-DRB1*09:01L HLA-DRB1*12:02L
  source 1..12: note = Severe acute respiratory syndrome coronavirus 2
NVAFQTVKPGNF

SEQ ID NO: 20331 - protein, 12 aa, Severe acute respiratory syndrome-related coronavirus
  REGION 1..12: note = Table B: HLA-DRB1*08:04L HLA-DRB1*11:01L HLA-DRB5*01:01L HLA-DRB1*09:01L HLA-DRB3*01:01L HLA-DRB1*08:03L
  source 1..12: note = Severe acute respiratory syndrome coronavirus 2
VAFQTVKPGNFN

SEQ ID NO: 20332 - protein, 16 aa, Severe acute respiratory syndrome-related coronavirus
  REGION 1..16: note = Table B: HLA-DRB1*08:04L HLA-DPA1*01:03-B1*04:01L
  source 1..16: note = Severe acute respiratory syndrome coronavirus 2
PGNFNKDFYDFAVSKG

SEQ ID NO: 20333 - protein, 13 aa, Severe acute respiratory syndrome-related coronavirus
  REGION 1..13: note = Table B: HLA-DRB1*08:04L HLA-DRB1*04:08L
  source 1..13: note = Severe acute respiratory syndrome coronavirus 2
NAAISDYDYYRYN

SEQ ID NO: 20334 - protein, 14 aa, Severe acute respiratory syndrome-related coronavirus
  REGION 1..14: note = Table B: HLA-DRB1*08:04L
  source 1..14: note = Severe acute respiratory syndrome coronavirus 2
VVEVVDKYFDCYDG

SEQ ID NO: 20335 - protein, 11 aa, Severe acute respiratory syndrome-related coronavirus
  REGION 1..11: note = Table B: HLA-DRB1*08:04L HLA-DRB1*08:03L
  source 1..11: note = Severe acute respiratory syndrome coronavirus 2
KYAISAKNRAR

SEQ ID NO: 20336 - protein, 11 aa, Severe acute respiratory syndrome-related coronavirus
  REGION 1..11: note = Table B: HLA-DRB1*08:04L HLA-DRB1*11:03L HLA-DRB1*15:03L
  source 1..11: note = Severe acute respiratory syndrome coronavirus 2
YAISAKNRART

SEQ ID NO: 20337 - protein, 14 aa, Severe acute respiratory syndrome-related coronavirus
  REGION 1..14: note = Table B: HLA-DRB1*08:04L HLA-DRB1*11:04L HLA-DRB1*08:01L
  source 1..14: note = Severe acute respiratory syndrome coronavirus 2
GVSICSTMTNRQFH

SEQ ID NO: 20338 - protein, 12 aa, Severe acute respiratory syndrome-related coronavirus
  REGION 1..12: note = Table B: HLA-DRB1*08:04L
  source 1..12: note = Severe acute respiratory syndrome coronavirus 2
TVVIGTSKFYGG

SEQ ID NO: 20339 - protein, 12 aa, Severe acute respiratory syndrome-related coronavirus
  REGION 1..12: note = Table B: HLA-DRB1*08:04L HLA-DRB1*14:01L HLA-DRB1*08:01L
  source 1..12: note = Severe acute respiratory syndrome coronavirus 2
GGWHNMLKTVYS

SEQ ID NO: 20340 - protein, 11 aa, Severe acute respiratory syndrome-related coronavirus
  REGION 1..11: note = Table B: HLA-DRB1*08:04L HLA-DRB1*13:01L HLA-DRB3*01:01L HLA-DRB1*15:01L
  source 1..11: note = Severe acute respiratory syndrome coronavirus 2
TVYSDVENPHL

SEQ ID NO: 20341 - protein, 15 aa, Severe acute respiratory syndrome-related coronavirus
  REGION 1..15: note = Table B: HLA-DRB1*08:04L HLA-DPA1*01:03-B1*04:02L HLA-DRB1*10:01L
  source 1..15: note = Severe acute respiratory syndrome coronavirus 2
SHRFYRLANECAQVL

SEQ ID NO: 20342 - protein, 14 aa, Severe acute respiratory syndrome-related coronavirus
  REGION 1..14: note = Table B: HLA-DRB1*08:04L HLA-DRB1*14:01L
  source 1..14: note = Severe acute respiratory syndrome coronavirus 2
ATTAYANSVFNICQ

SEQ ID NO: 20343 - protein, 12 aa, Severe acute respiratory syndrome-related coronavirus
  REGION 1..12: note = Table B: HLA-DRB1*08:04L HLA-DRB1*13:01L HLA-DRB1*07:01L
  source 1..12: note = Severe acute respiratory syndrome coronavirus 2
KYVRNLQHRLYE

SEQ ID NO: 20344 - protein, 12 aa, Severe acute respiratory syndrome-related coronavirus
  REGION 1..12: note = Table B: HLA-DRB1*08:04L HLA-DRB1*04:08L
  source 1..12: note = Severe acute respiratory syndrome coronavirus 2
YECLYRNRDVDT

SEQ ID NO: 20345 - protein, 14 aa, Severe acute respiratory syndrome-related coronavirus
  REGION 1..14: note = Table B: HLA-DRB1*08:04L
  source 1..14: note = Severe acute respiratory syndrome coronavirus 2
CLYRNRDVDTDFVN

SEQ ID NO: 20346 - protein, 13 aa, Severe acute respiratory syndrome-related coronavirus
  REGION 1..13: note = Table B: HLA-DRB1*08:04L HLA-DRB1*04:08L
  source 1..13: note = Severe acute respiratory syndrome coronavirus 2
RDVDTDFVNEFYA

SEQ ID NO: 20347 - protein, 12 aa, Severe acute respiratory syndrome-related coronavirus
  REGION 1..12: note = Table B: HLA-DRB1*08:04L
  source 1..12: note = Severe acute respiratory syndrome coronavirus 2
FYAYLRKHFSMM

SEQ ID NO: 20348 - protein, 16 aa, Severe acute respiratory syndrome-related coronavirus
  REGION 1..16: note = Table B: HLA-DRB1*08:04L HLA-DPA1*01:03-B1*04:02L
  source 1..16: note = Severe acute respiratory syndrome coronavirus 2
YAYLRKHFSMMILSDD

SEQ ID NO: 20349 - protein, 13 aa, Severe acute respiratory syndrome-related coronavirus
  REGION 1..13: note = Table B: HLA-DRB1*08:04L HLA-DRB1*07:01L
  source 1..13: note = Severe acute respiratory syndrome coronavirus 2
SIKNFKSVLYYQN

SEQ ID NO: 20350 - protein, 17 aa, Severe acute respiratory syndrome-related coronavirus
  REGION 1..17: note = Table B: HLA-DRB1*08:04L HLA-DPA1*01:03-B1*04:02L HLA-DRB1*12:01L
  source 1..17: note = Severe acute respiratory syndrome coronavirus 2
PHEFCSQHTMLVKQGDD

SEQ ID NO: 20351 - protein, 15 aa, Severe acute respiratory syndrome-related coronavirus
  REGION 1..15: note = Table B: HLA-DRB1*08:04L
  source 1..15: note = Severe acute respiratory syndrome coronavirus 2
SQHTMLVKQGDDYVY

SEQ ID NO: 20352 - protein, 12 aa, Severe acute respiratory syndrome-related coronavirus
  REGION 1..12: note = Table B: HLA-DRB1*08:04L HLA-DPA1*01:03-B1*03:01L HLA-DPA1*03:01-B1*04:02L HLA-DQA1*01:01-B1*05:01L HLA-DQA1*05:05-B1*03:19L HLA-DPA1*01:03-B1*04:01L HLA-DPA1*02:01-B1*13:01L HLA-DRB1*10:01L HLA-DRB1*08:03L
  source 1..12: note = Severe acute respiratory syndrome coronavirus 2
DYVYLPYPDPSR

SEQ ID NO: 20353 - protein, 13 aa, Severe acute respiratory syndrome-related coronavirus
  REGION 1..13: note = Table B: HLA-DRB1*08:04L HLA-DRB1*11:03L HLA-DRB1*11:04L
  source 1..13: note = Severe acute respiratory syndrome coronavirus 2
VYLPYPDPSRILG

SEQ ID NO: 20354 - protein, 15 aa, Severe acute respiratory syndrome-related coronavirus
  REGION 1..15: note = Table B: HLA-DRB1*08:04L
  source 1..15: note = Severe acute respiratory syndrome coronavirus 2
GAGCFVDDIVKTDGT

SEQ ID NO: 20355 - protein, 15 aa, Severe acute respiratory syndrome-related coronavirus
  REGION 1..15: note = Table B: HLA-DRB1*08:04L HLA-DPA1*03:01-B1*04:02L HLA-DPA1*01:03-B1*04:02L HLA-DPA1*02:01-B1*13:01L
  source 1..15: note = Severe acute respiratory syndrome coronavirus 2
AGCFVDDIVKTDGTL

SEQ ID NO: 20356 - protein, 11 aa, Severe acute respiratory syndrome-related coronavirus
  REGION 1..11: note = Table B: HLA-DRB1*08:04L HLA-DPA1*01:03-B1*03:01L HLA-DRB1*14:02L HLA-DRB1*04:10L HLA-DRB3*01:01L HLA-DRB1*04:08L
  source 1..11: note = Severe acute respiratory syndrome coronavirus 2
DDIVKTDGTLM

SEQ ID NO: 20357 - protein, 15 aa, Severe acute respiratory syndrome-related coronavirus
  REGION 1..15: note = Table B: HLA-DRB1*08:04L HLA-DPA1*01:03-B1*03:01L HLA-DRB1*03:01L HLA-DRB1*11:04L HLA-DRB3*01:01L HLA-DPA1*01:03-B1*02:01L
  source 1..15: note = Severe acute respiratory syndrome coronavirus 2
VSLAIDAYPLTKHPN

SEQ ID NO: 20358 - protein, 14 aa, Severe acute respiratory syndrome-related coronavirus
  REGION 1..14: note = Table B: HLA-DRB1*08:04L HLA-DRB1*11:04L HLA-DRB1*08:01L
  source 1..14: note = Severe acute respiratory syndrome coronavirus 2
AYPLTKHPNQEYAD

SEQ ID NO: 20359 - protein, 14 aa, Severe acute respiratory syndrome-related coronavirus
  REGION 1..14: note = Table B: HLA-DRB1*08:04L HLA-DRB1*08:01L
  source 1..14: note = Severe acute respiratory syndrome coronavirus 2
YPLTKHPNQEYADV

SEQ ID NO: 20360 - protein, 15 aa, Severe acute respiratory syndrome-related coronavirus
  REGION 1..15: note = Table B: HLA-DRB1*08:04L HLA-DRB1*08:01L HLA-DRB1*04:08L
  source 1..15: note = Severe acute respiratory syndrome coronavirus 2
HPNQEYADVFHLYLQ

SEQ ID NO: 20361 - protein, 15 aa, Severe acute respiratory syndrome-related coronavirus
  REGION 1..15: note = Table B: HLA-DRB1*08:04L
  source 1..15: note = Severe acute respiratory syndrome coronavirus 2
KLSYGIATVREVLSD

SEQ ID NO: 20362 - protein, 16 aa, Severe acute respiratory syndrome-related coronavirus
  REGION 1..16: note = Table B: HLA-DRB1*08:04L HLA-DPA1*01:03-B1*04:02L
  source 1..16: note = Severe acute respiratory syndrome coronavirus 2
LSYGIATVREVLSDRE

SEQ ID NO: 20363 - protein, 13 aa, Severe acute respiratory syndrome-related coronavirus
  REGION 1..13: note = Table B: HLA-DRB1*08:04L HLA-DRB3*02:01L HLA-DPA1*03:01-B1*04:02L HLA-DRB1*08:03L
  source 1..13: note = Severe acute respiratory syndrome coronavirus 2
IATVREVLSDREL

SEQ ID NO: 20364 - protein, 12 aa, Severe acute respiratory syndrome-related coronavirus
  REGION 1..12: note = Table B: HLA-DRB1*08:04L HLA-DRB3*01:01L HLA-DRB1*04:08L
  source 1..12: note = Severe acute respiratory syndrome coronavirus 2
REVLSDRELHLS

SEQ ID NO: 20365 - protein, 18 aa, Severe acute respiratory syndrome-related coronavirus
  REGION 1..18: note = Table B: HLA-DRB1*08:04L HLA-DPA1*01:03-B1*04:02L HLA-DQA1*03:01-B1*03:02L HLA-DPA1*01:03-B1*02:01L HLA-DPA1*01:03-B1*104:01L HLA-DRB1*07:01L HLA-DQA1*01:03-B1*06:01L
  source 1..18: note = Severe acute respiratory syndrome coronavirus 2
KPRPPLNRNYVFTGYRVT

SEQ ID NO: 20366 - protein, 13 aa, Severe acute respiratory syndrome-related coronavirus
  REGION 1..13: note = Table B: HLA-DRB1*08:04L
  source 1..13: note = Severe acute respiratory syndrome coronavirus 2
AVVYRGTTTYKLN

SEQ ID NO: 20367 - protein, 14 aa, Severe acute respiratory syndrome-related coronavirus
  REGION 1..14: note = Table B: HLA-DRB1*08:04L HLA-DRB1*03:01L HLA-DRB1*11:02L HLA-DQA1*01-B1*05L HLA-DRB4*02:01NL HLA-DRB1*04:10L HLA-DPA1*01:03-B1*04:02L HLA-DPA1*01:03-B1*02:01L HLA-DPA1*01:03-B1*104:01L HLA-DRB1*08:02L HLA-DRB1*08:03L
  source 1..14: note = Severe acute respiratory syndrome coronavirus 2
VVYRGTTTYKLNVG

SEQ ID NO: 20368 - protein, 12 aa, Severe acute respiratory syndrome-related coronavirus
  REGION 1..12: note = Table B: HLA-DRB1*08:04L HLA-DRB3*02:01L HLA-DRB1*09:01L HLA-DRB1*12:02L HLA-DRB3*01:01L HLA-DRB1*14:54L HLA-DRB1*04:08L
  source 1..12: note = Severe acute respiratory syndrome coronavirus 2
TTTYKLNVGDYF

SEQ ID NO: 20369 - protein, 13 aa, Severe acute respiratory syndrome-related coronavirus
  REGION 1..13: note = Table B: HLA-DRB1*08:04L HLA-DPA1*01:03-B1*03:01L
  source 1..13: note = Severe acute respiratory syndrome coronavirus 2
YFVLTSHTVMPLS

SEQ ID NO: 20370 - protein, 15 aa, Severe acute respiratory syndrome-related coronavirus
  REGION 1..15: note = Table B: HLA-DRB1*08:04L HLA-DRB1*03:01L HLA-DRB1*11:04L HLA-DRB1*11:01L HLA-DRB4*02:01NL HLA-DRB3*01:01L HLA-DPA1*01:03-B1*104:01L HLA-DRB1*08:02L HLA-DRB1*15:01L
  source 1..15: note = Severe acute respiratory syndrome coronavirus 2
SHTVMPLSAPTLVPQ

SEQ ID NO: 20371 - protein, 14 aa, Severe acute respiratory syndrome-related coronavirus
  REGION 1..14: note = Table B: HLA-DRB1*08:04L HLA-DRB3*02:01L HLA-DRB1*11:02L HLA-DRB1*11:04L HLA-DRB1*11:01L HLA-DRB3*01:01L
  source 1..14: note = Severe acute respiratory syndrome coronavirus 2
APTLVPQEHYVRIT

SEQ ID NO: 20372 - protein, 14 aa, Severe acute respiratory syndrome-related coronavirus
  REGION 1..14: note = Table B: HLA-DRB1*08:04L HLA-DPA1*01:03-B1*04:02L HLA-DPA1*02:01-B1*13:01L HLA-DRB1*10:01L
  source 1..14: note = Severe acute respiratory syndrome coronavirus 2
EHYVRITGLYPTLN

SEQ ID NO: 20373 - protein, 12 aa, Severe acute respiratory syndrome-related coronavirus
  REGION 1..12: note = Table B: HLA-DRB1*08:04L HLA-DRB3*02:01L HLA-DRB1*11:03L HLA-DRB1*11:04L HLA-DRB1*04:10L HLA-DRB1*09:01L HLA-DRB1*12:02L HLA-DQA1*05:05-B1*03:01L HLA-DRB1*04:08L
  source 1..12: note = Severe acute respiratory syndrome coronavirus 2
SDEFSSNVANYQ

SEQ ID NO: 20374 - protein, 12 aa, Severe acute respiratory syndrome-related coronavirus
  REGION 1..12: note = Table B: HLA-DRB1*08:04L HLA-DRB3*02:01L HLA-DRB1*12:02L HLA-DRB3*01:01L HLA-DRB1*14:54L HLA-DRB1*07:01L
  source 1..12: note = Severe acute respiratory syndrome coronavirus 2
VANYQKVGMQKY

SEQ ID NO: 20375 - protein, 14 aa, Severe acute respiratory syndrome-related coronavirus
  REGION 1..14: note = Table B: HLA-DRB1*08:04L HLA-DPA1*01:03-B1*03:01L HLA-DRB1*08:01L HLA-DRB1*12:01L HLA-DRB1*15:03L
  source 1..14: note = Severe acute respiratory syndrome coronavirus 2
HFAIGLALYYPSAR

SEQ ID NO: 20376 - protein, 17 aa, Severe acute respiratory syndrome-related coronavirus
  REGION 1..17: note = Table B: HLA-DRB1*08:04L HLA-DPA1*01:03-B1*03:01L
  source 1..17: note = Severe acute respiratory syndrome coronavirus 2
EKALKYLPIDKCSRIIP

SEQ ID NO: 20377 - protein, 18 aa, Severe acute respiratory syndrome-related coronavirus
  REGION 1..18: note = Table B: HLA-DRB1*08:04L HLA-DPA1*01:02-B1*04:01L
  source 1..18: note = Severe acute respiratory syndrome coronavirus 2
IPARARVECFDKFKVNST

SEQ ID NO: 20378 - protein, 12 aa, Severe acute respiratory syndrome-related coronavirus
  REGION 1..12: note = Table B: HLA-DRB1*08:04L HLA-DRB1*04:08L
  source 1..12: note = Severe acute respiratory syndrome coronavirus 2
KFKVNSTLEQYV

SEQ ID NO: 20379 - protein, 17 aa, Severe acute respiratory syndrome-related coronavirus
  REGION 1..17: note = Table B: HLA-DRB1*08:04L
  source 1..17: note = Severe acute respiratory syndrome coronavirus 2
APRTLLTKGTLEPEYFN

SEQ ID NO: 20380 - protein, 17 aa, Severe acute respiratory syndrome-related coronavirus
  REGION 1..17: note = Table B: HLA-DRB1*08:04L HLA-DQA1*05:05-B1*03:19L
  source 1..17: note = Severe acute respiratory syndrome coronavirus 2
PEYFNSVCRLMKTIGPD

SEQ ID NO: 20381 - protein, 11 aa, Severe acute respiratory syndrome-related coronavirus
  REGION 1..11: note = Table B: HLA-DRB1*08:04L HLA-DRB1*08:77L HLA-DRB1*03:01L HLA-DRB1*11:03L HLA-DRB1*14:02L HLA-DQA1*05:01-B1*02:01L
  source 1..11: note = Severe acute respiratory syndrome coronavirus 2
ALVYDNKLKAH

SEQ ID NO: 20382 - protein, 18 aa, Severe acute respiratory syndrome-related coronavirus
  REGION 1..18: note = Table B: HLA-DRB1*08:04L
  source 1..18: note = Severe acute respiratory syndrome coronavirus 2
DKSAQCFKMFYKGVITHD

SEQ ID NO: 20383 - protein, 12 aa, Severe acute respiratory syndrome-related coronavirus
  REGION 1..12: note = Table B: HLA-DRB1*08:04L HLA-DPA1*03:01-B1*04:02L HLA-DPA1*01:03-B1*04:01L HLA-DRB1*09:01L HLA-DRB3*01:01L HLA-DPA1*02:01-B1*13:01L HLA-DPA1*01:03-B1*02:01L HLA-DPA1*01:03-B1*104:01L HLA-DRB1*07:01L
  source 1..12: note = Severe acute respiratory syndrome coronavirus 2
DVSSAINRPQIG

SEQ ID NO: 20384 - protein, 17 aa, Severe acute respiratory syndrome-related coronavirus
  REGION 1..17: note = Table B: HLA-DRB1*08:04L
  source 1..17: note = Severe acute respiratory syndrome coronavirus 2
VVREFLTRNPAWRKAVF

SEQ ID NO: 20385 - protein, 13 aa, Severe acute respiratory syndrome-related coronavirus
  REGION 1..13: note = Table B: HLA-DRB1*08:04L HLA-DRB1*11:02L HLA-DRB1*14:02L HLA-DRB1*09:01L HLA-DRB1*12:02L HLA-DRB1*07:01L
  source 1..13: note = Severe acute respiratory syndrome coronavirus 2
VFISPYNSQNAVA

SEQ ID NO: 20386 - protein, 15 aa, Severe acute respiratory syndrome-related coronavirus
  REGION 1..15: note = Table B: HLA-DRB1*08:04L HLA-DRB1*14:01L
  source 1..15: note = Severe acute respiratory syndrome coronavirus 2
NSQNAVASKILGLPT

SEQ ID NO: 20387 - protein, 14 aa, Severe acute respiratory syndrome-related coronavirus
  REGION 1..14: note = Table B: HLA-DRB1*08:04L HLA-DQA1*05:05-B1*03:19L HLA-DPA1*01:03-B1*02:01L HLA-DQA1*05:05-B1*03:01L
  source 1..14: note = Severe acute respiratory syndrome coronavirus 2
EYDYVIFTQTTETA

SEQ ID NO: 20388 - protein, 12 aa, Severe acute respiratory syndrome-related coronavirus
  REGION 1..12: note = Table B: HLA-DRB1*08:04L HLA-DRB1*08:01L HLA-DPA1*02:01-B1*13:01L
  source 1..12: note = Severe acute respiratory syndrome coronavirus 2
YVIFTQTTETAH

SEQ ID NO: 20389 - protein, 16 aa, Severe acute respiratory syndrome-related coronavirus
  REGION 1..16: note = Table B: HLA-DRB1*08:04L HLA-DRB1*11:04L HLA-DRB1*11:01L HLA-DRB3*01:01L HLA-DPA1*01:03-B1*02:01L
  source 1..16: note = Severe acute respiratory syndrome coronavirus 2
RDLYDKLQFTSLEIPR

SEQ ID NO: 20390 - protein, 12 aa, Severe acute respiratory syndrome-related coronavirus
  REGION 1..12: note = Table B: HLA-DRB1*08:04L HLA-DRB1*08:01L HLA-DRB1*08:03L
  source 1..12: note = Severe acute respiratory syndrome coronavirus 2
GYVDTPNNTDFS

SEQ ID NO: 20391 - protein, 15 aa, Severe acute respiratory syndrome-related coronavirus
  REGION 1..15: note = Table B: HLA-DRB1*08:04L
  source 1..15: note = Severe acute respiratory syndrome coronavirus 2
FKHLIPLMYKGLPWN

SEQ ID NO: 20392 - protein, 13 aa, Severe acute respiratory syndrome-related coronavirus
  REGION 1..13: note = Table B: HLA-DRB1*08:04L HLA-DRB1*14:01L HLA-DRB1*11:01L HLA-DPA1*01:03-B1*04:02L HLA-DPA1*03:01-B1*105:01L HLA-DRB1*04:08L
  source 1..13: note = Severe acute respiratory syndrome coronavirus 2
DTYACWHHSIGFD

SEQ ID NO: 20393 - protein, 14 aa, Severe acute respiratory syndrome-related coronavirus
  REGION 1..14: note = Table B: HLA-DRB1*08:04L HLA-DRB1*14:02L
  source 1..14: note = Severe acute respiratory syndrome coronavirus 2
SIGFDYVYNPFMID

SEQ ID NO: 20394 - protein, 13 aa, Severe acute respiratory syndrome-related coronavirus
  REGION 1..13: note = Table B: HLA-DRB1*08:04L HLA-DPA1*01:03-B1*03:01L
  source 1..13: note = Severe acute respiratory syndrome coronavirus 2
VYNPFMIDVQQWG

SEQ ID NO: 20395 - protein, 14 aa, Severe acute respiratory syndrome-related coronavirus
  REGION 1..14: note = Table B: HLA-DRB1*08:04L HLA-DPA1*01:03-B1*03:01L HLA-DRB1*08:01L HLA-DQA1*01-B1*05L HLA-DPA1*01:03-B1*02:01L
  source 1..14: note = Severe acute respiratory syndrome coronavirus 2
ALLADKFPVLHDIG

SEQ ID NO: 20396 - protein, 15 aa, Severe acute respiratory syndrome-related coronavirus
  REGION 1..15: note = Table B: HLA-DRB1*08:04L
  source 1..15: note = Severe acute respiratory syndrome coronavirus 2
DVEWKFYDAQPCSDK

SEQ ID NO: 20397 - protein, 15 aa, Severe acute respiratory syndrome-related coronavirus
  REGION 1..15: note = Table B: HLA-DRB1*08:04L
  source 1..15: note = Severe acute respiratory syndrome coronavirus 2
VEWKFYDAQPCSDKA

SEQ ID NO: 20398 - protein, 14 aa, Severe acute respiratory syndrome-related coronavirus
  REGION 1..14: note = Table B: HLA-DRB1*08:04L HLA-DPA1*02:01-B1*13:01L
  source 1..14: note = Severe acute respiratory syndrome coronavirus 2
VVSDIDYVPLKSAT

SEQ ID NO: 20399 - protein, 15 aa, Severe acute respiratory syndrome-related coronavirus
  REGION 1..15: note = Table B: HLA-DRB1*08:04L HLA-DRB3*02:01L HLA-DPA1*01:03-B1*104:01L
  source 1..15: note = Severe acute respiratory syndrome coronavirus 2
VYKQFDTYNLWNTFT

SEQ ID NO: 20400 - protein, 11 aa, Severe acute respiratory syndrome-related coronavirus
  REGION 1..11: note = Table B: HLA-DRB1*08:04L HLA-DRB1*14:01L HLA-DRB1*08:01L
  source 1..11: note = Severe acute respiratory syndrome coronavirus 2
NLWNTFTRLQS

SEQ ID NO: 20401 - protein, 12 aa, Severe acute respiratory syndrome-related coronavirus
  REGION 1..12: note = Table B: HLA-DRB1*08:04L HLA-DRB1*08:01L HLA-DRB1*11:01L HLA-DRB1*04:08L
  source 1..12: note = Severe acute respiratory syndrome coronavirus 2
LWNTFTRLQSLE

SEQ ID NO: 20402 - protein, 14 aa, Severe acute respiratory syndrome-related coronavirus
  REGION 1..14: note = Table B: HLA-DRB1*08:04L HLA-DRB1*11:02L
  source 1..14: note = Severe acute respiratory syndrome coronavirus 2
TFTRLQSLENVAFN

SEQ ID NO: 20403 - protein, 14 aa, Severe acute respiratory syndrome-related coronavirus
  REGION 1..14: note = Table B: HLA-DRB1*08:04L
  source 1..14: note = Severe acute respiratory syndrome coronavirus 2
APLTVFFDGRVDGQ

SEQ ID NO: 20404 - protein, 12 aa, Severe acute respiratory syndrome-related coronavirus
  REGION 1..12: note = Table B: HLA-DRB1*08:04L
  source 1..12: note = Severe acute respiratory syndrome coronavirus 2
TYFTQSRNLQEF

SEQ ID NO: 20405 - protein, 12 aa, Severe acute respiratory syndrome-related coronavirus
  REGION 1..12: note = Table B: HLA-DRB1*08:04L HLA-DRB3*01:01L HLA-DRB1*04:08L
  source 1..12: note = Severe acute respiratory syndrome coronavirus 2
ELAMDEFIERYK

SEQ ID NO: 20406 - protein, 13 aa, Severe acute respiratory syndrome-related coronavirus
  REGION 1..13: note = Table B: HLA-DRB1*08:04L
  source 1..13: note = Severe acute respiratory syndrome coronavirus 2
FIERYKLEGYAFE

SEQ ID NO: 20407 - protein, 12 aa, Severe acute respiratory syndrome-related coronavirus
  REGION 1..12: note = Table B: HLA-DRB1*08:04L HLA-DPA1*01:03-B1*02:01L HLA-DQA1*05:05-B1*03:01L
  source 1..12: note = Severe acute respiratory syndrome coronavirus 2
IVYGDFSHSQLG

SEQ ID NO: 20408 - protein, 14 aa, Severe acute respiratory syndrome-related coronavirus
  REGION 1..14: note = Table B: HLA-DRB1*08:04L
  source 1..14: note = Severe acute respiratory syndrome coronavirus 2
AKRFKESPFELEDF

SEQ ID NO: 20409 - protein, 13 aa, Severe acute respiratory syndrome-related coronavirus
  REGION 1..13: note = Table B: HLA-DRB1*08:04L HLA-DRB1*14:01L HLA-DRB1*11:04L HLA-DRB1*11:01L HLA-DPA1*01:03-B1*02:01L
  source 1..13: note = Severe acute respiratory syndrome coronavirus 2
KESPFELEDFIPM

SEQ ID NO: 20410 - protein, 13 aa, Severe acute respiratory syndrome-related coronavirus
  REGION 1..13: note = Table B: HLA-DRB1*08:04L
  source 1..13: note = Severe acute respiratory syndrome coronavirus 2
DFIPMDSTVKNYF

SEQ ID NO: 20411 - protein, 14 aa, Severe acute respiratory syndrome-related coronavirus
  REGION 1..14: note = Table B: HLA-DRB1*08:04L HLA-DQA1*01:01-B1*05:01L
  source 1..14: note = Severe acute respiratory syndrome coronavirus 2
IPMDSTVKNYFITD

SEQ ID NO: 20412 - protein, 14 aa, Severe acute respiratory syndrome-related coronavirus
  REGION 1..14: note = Table B: HLA-DRB1*08:04L HLA-DPA1*01:03-B1*03:01L HLA-DRB1*03:01L HLA-DRB1*11:03L HLA-DRB1*11:04L HLA-DRB1*11:01L HLA-DRB3*01:01L HLA-DRB1*04:08L
  source 1..14: note = Severe acute respiratory syndrome coronavirus 2
SQDLSVVSKVVKVT

SEQ ID NO: 20413 - protein, 13 aa, Severe acute respiratory syndrome-related coronavirus
  REGION 1..13: note = Table B: HLA-DRB1*08:04L
  source 1..13: note = Severe acute respiratory syndrome coronavirus 2
LSVVSKVVKVTID

SEQ ID NO: 20414 - protein, 12 aa, Severe acute respiratory syndrome-related coronavirus
  REGION 1..12: note = Table B: HLA-DRB1*08:04L HLA-DRB3*01:01L
  source 1..12: note = Severe acute respiratory syndrome coronavirus 2
KVTIDYTEISFM

SEQ ID NO: 20415 - protein, 13 aa, Severe acute respiratory syndrome-related coronavirus
  REGION 1..13: note = Table B: HLA-DRB1*08:04L HLA-DRB1*04:08L
  source 1..13: note = Severe acute respiratory syndrome coronavirus 2
VPYNMRVIHFGAG

SEQ ID NO: 20416 - protein, 16 aa, Severe acute respiratory syndrome-related coronavirus
  REGION 1..16: note = Table B: HLA-DRB1*08:04L HLA-DRB1*08:01L HLA-DPA1*01:03-B1*04:02L HLA-DPA1*01:03-B1*104:01L
  source 1..16: note = Severe acute respiratory syndrome coronavirus 2
APGTAVLRQWLPTGTL

SEQ ID NO: 20417 - protein, 13 aa, Severe acute respiratory syndrome-related coronavirus
  REGION 1..13: note = Table B: HLA-DRB1*08:04L
  source 1..13: note = Severe acute respiratory syndrome coronavirus 2
GFIQQKLALGGSV

SEQ ID NO: 20418 - protein, 13 aa, Severe acute respiratory syndrome-related coronavirus
  REGION 1..13: note = Table B: HLA-DRB1*08:04L HLA-DPA1*03:01-B1*04:02L HLA-DPA1*01:02-B1*04:01L
  source 1..13: note = Severe acute respiratory syndrome coronavirus 2
GGSVAIKITEHSW

SEQ ID NO: 20419 - protein, 14 aa, Severe acute respiratory syndrome-related coronavirus
  REGION 1..14: note = Table B: HLA-DRB1*08:04L
  source 1..14: note = Severe acute respiratory syndrome coronavirus 2
ITEHSWNADLYKLM

SEQ ID NO: 20420 - protein, 14 aa, Severe acute respiratory syndrome-related coronavirus
  REGION 1..14: note = Table B: HLA-DRB1*08:04L
  source 1..14: note = Severe acute respiratory syndrome coronavirus 2
TEHSWNADLYKLMG

SEQ ID NO: 20421 - protein, 18 aa, Severe acute respiratory syndrome-related coronavirus
  REGION 1..18: note = Table B: HLA-DRB1*08:04L HLA-DPA1*01:03-B1*03:01L
  source 1..18: note = Severe acute respiratory syndrome coronavirus 2
DGYVMHANYIFWRNTNPI

SEQ ID NO: 20422 - protein, 13 aa, Severe acute respiratory syndrome-related coronavirus
  REGION 1..13: note = Table B: HLA-DRB1*08:04L HLA-DRB1*08:01L HLA-DQA1*05:05-B1*03:19L
  source 1..13: note = Severe acute respiratory syndrome coronavirus 2
DMILSLLSKGRLI

SEQ ID NO: 20423 - protein, 15 aa, Severe acute respiratory syndrome-related coronavirus
  REGION 1..15: note = Table B: HLA-DRB1*08:04L HLA-DRB1*03:01L HLA-DRB1*11:02L HLA-DRB1*11:03L HLA-DRB1*13:01L
  source 1..15: note = Severe acute respiratory syndrome coronavirus 2
ILSLLSKGRLIIREN

SEQ ID NO: 20424 - protein, 14 aa, Severe acute respiratory syndrome-related coronavirus
  REGION 1..14: note = Table B: HLA-DRB1*08:04L HLA-DRB1*08:03L HLA-DRB1*15:01L
  source 1..14: note = Severe acute respiratory syndrome coronavirus 2
DNPVLPFNDGVYFA

SEQ ID NO: 20425 - protein, 15 aa, Severe acute respiratory syndrome-related coronavirus
  REGION 1..15: note = Table B: HLA-DRB1*08:04L HLA-DRB1*08:01L HLA-DRB1*15:03L
  source 1..15: note = Severe acute respiratory syndrome coronavirus 2
DSKTQSLLIVNNATN

SEQ ID NO: 20426 - protein, 12 aa, Severe acute respiratory syndrome-related coronavirus
  REGION 1..12: note = Table B: HLA-DRB1*08:04L HLA-DRB1*11:04L HLA-DQA1*05:05-B1*03:01L HLA-DRB1*04:08L
  source 1..12: note = Severe acute respiratory syndrome coronavirus 2
LLIVNNATNVVI

SEQ ID NO: 20427 - protein, 14 aa, Severe acute respiratory syndrome-related coronavirus
  REGION 1..14: note = Table B: HLA-DRB1*08:04L HLA-DRB1*14:01L HLA-DRB1*11:04L HLA-DRB1*11:01L HLA-DRB3*01:01L
  source 1..14: note = Severe acute respiratory syndrome coronavirus 2
NKSWMESEFRVYSS

SEQ ID NO: 20428 - protein, 14 aa, Severe acute respiratory syndrome-related coronavirus
  REGION 1..14: note = Table B: HLA-DRB1*08:04L HLA-DRB1*11:02L HLA-DRB1*08:01L HLA-DRB1*11:01L HLA-DRB1*09:01L HLA-DRB1*10:01L
  source 1..14: note = Severe acute respiratory syndrome coronavirus 2
EFRVYSSANNCTFE

SEQ ID NO: 20429 - protein, 13 aa, Severe acute respiratory syndrome-related coronavirus
  REGION 1..13: note = Table B: HLA-DRB1*08:04L HLA-DRB1*08:01L
  source 1..13: note = Severe acute respiratory syndrome coronavirus 2
TFEYVSQPFLMDL

SEQ ID NO: 20430 - protein, 12 aa, Severe acute respiratory syndrome-related coronavirus
  REGION 1..12: note = Table B: HLA-DRB1*08:04L HLA-DRB1*08:01L HLA-DPA1*01:03-B1*02:01L
  source 1..12: note = Severe acute respiratory syndrome coronavirus 2
EYVSQPFLMDLE

SEQ ID NO: 20431 - protein, 12 aa, Severe acute respiratory syndrome-related coronavirus
  REGION 1..12: note = Table B: HLA-DRB1*08:04L HLA-DRB3*01:01L
  source 1..12: note = Severe acute respiratory syndrome coronavirus 2
EFVFKNIDGYFK

SEQ ID NO: 20432 - protein, 12 aa, Severe acute respiratory syndrome-related coronavirus
  REGION 1..12: note = Table B: HLA-DRB1*08:04L HLA-DRB1*03:01L
  source 1..12: note = Severe acute respiratory syndrome coronavirus 2
NLVRDLPQGFSA

SEQ ID NO: 20433 - protein, 13 aa, Severe acute respiratory syndrome-related coronavirus
  REGION 1..13: note = Table B: HLA-DRB1*08:04L HLA-DRB3*02:01L HLA-DRB1*14:54L
  source 1..13: note = Severe acute respiratory syndrome coronavirus 2
VDLPIGINITRFQ

SEQ ID NO: 20434 - protein, 12 aa, Severe acute respiratory syndrome-related coronavirus
  REGION 1..12: note = Table B: HLA-DRB1*08:04L HLA-DRB1*08:01L
  source 1..12: note = Severe acute respiratory syndrome coronavirus 2
AYYVGYLQPRTF

SEQ ID NO: 20435 - protein, 12 aa, Severe acute respiratory syndrome-related coronavirus
  REGION 1..12: note = Table B: HLA-DRB1*08:04L HLA-DRB1*14:01L HLA-DRB1*08:01L HLA-DRB1*12:01L HLA-DPA1*03:01-B1*105:01L HLA-DRB1*10:01L HLA-DRB1*15:03L
  source 1..12: note = Severe acute respiratory syndrome coronavirus 2
KSFTVEKGIYQT

SEQ ID NO: 20436 - protein, 14 aa, Severe acute respiratory syndrome-related coronavirus
  REGION 1..14: note = Table B: HLA-DRB1*08:04L HLA-DRB3*02:01L HLA-DPA1*03:01-B1*04:02L HLA-DRB1*08:01L HLA-DPA1*01:03-B1*04:01L HLA-DRB1*04:10L HLA-DPA1*01:03-B1*04:02L HLA-DRB1*08:03L
  source 1..14: note = Severe acute respiratory syndrome coronavirus 2
VQPTESIVRFPNIT

SEQ ID NO: 20437 - protein, 14 aa, Severe acute respiratory syndrome-related coronavirus
  REGION 1..14: note = Table B: HLA-DRB1*08:04L HLA-DPA1*01:03-B1*03:01L HLA-DPA1*02:01-B1*13:01L HLA-DQA1*05:05-B1*03:01L
  source 1..14: note = Severe acute respiratory syndrome coronavirus 2
QPTESIVRFPNITN

SEQ ID NO: 20438 - protein, 12 aa, Severe acute respiratory syndrome-related coronavirus
  REGION 1..12: note = Table B: HLA-DRB1*08:04L
  source 1..12: note = Severe acute respiratory syndrome coronavirus 2
ESIVRFPNITNL

SEQ ID NO: 20439 - protein, 13 aa, Severe acute respiratory syndrome-related coronavirus
  REGION 1..13: note = Table B: HLA-DRB1*08:04L HLA-DRB1*04:10L HLA-DRB1*14:54L
  source 1..13: note = Severe acute respiratory syndrome coronavirus 2
NVYADSFVIRGDE

SEQ ID NO: 20440 - protein, 15 aa, Severe acute respiratory syndrome-related coronavirus
  REGION 1..15: note = Table B: HLA-DRB1*08:04L HLA-DPA1*01:03-B1*03:01L HLA-DRB1*03:01L HLA-DQA1*05:01-B1*02:01L HLA-DPA1*03:01-B1*105:01L
  source 1..15: note = Severe acute respiratory syndrome coronavirus 2
DSFVIRGDEVRQIAP

SEQ ID NO: 20441 - protein, 12 aa, Severe acute respiratory syndrome-related coronavirus
  REGION 1..12: note = Table B: HLA-DRB1*08:04L HLA-DRB1*08:01L HLA-DRB1*04:08L
  source 1..12: note = Severe acute respiratory syndrome coronavirus 2
NNLDSKVGGNYN

SEQ ID NO: 20442 - protein, 15 aa, Severe acute respiratory syndrome-related coronavirus
  REGION 1..15: note = Table B: HLA-DRB1*08:04L
  source 1..15: note = Severe acute respiratory syndrome coronavirus 2
YNYLYRLFRKSNLKP

SEQ ID NO: 20443 - protein, 15 aa, Severe acute respiratory syndrome-related coronavirus
  REGION 1..15: note = Table B: HLA-DRB1*08:04L HLA-DRB1*11:03L
  source 1..15: note = Severe acute respiratory syndrome coronavirus 2
NYLYRLFRKSNLKPF

SEQ ID NO: 20444 - protein, 14 aa, Severe acute respiratory syndrome-related coronavirus
  REGION 1..14: note = Table B: HLA-DRB1*08:04L
  source 1..14: note = Severe acute respiratory syndrome coronavirus 2
LYRLFRKSNLKPFE

SEQ ID NO: 20445 - protein, 14 aa, Severe acute respiratory syndrome-related coronavirus
  REGION 1..14: note = Table B: HLA-DRB1*08:04L HLA-DRB3*02:01L HLA-DRB1*08:01L HLA-DRB1*11:01L HLA-DPA1*02:01-B1*13:01L HLA-DPA1*01:03-B1*104:01L
  source 1..14: note = Severe acute respiratory syndrome coronavirus 2
EIYQAGSTPCNGVE

SEQ ID NO: 20446 - protein, 14 aa, Severe acute respiratory syndrome-related coronavirus
  REGION 1..14: note = Table B: HLA-DRB1*08:04L HLA-DRB1*09:01L HLA-DRB1*12:02L HLA-DRB1*04:08L
  source 1..14: note = Severe acute respiratory syndrome coronavirus 2
YGFQPTNGVGYQPY

SEQ ID NO: 20447 - protein, 17 aa, Severe acute respiratory syndrome-related coronavirus
  REGION 1..17: note = Table B: HLA-DRB1*08:04L
  source 1..17: note = Severe acute respiratory syndrome coronavirus 2
QPTNGVGYQPYRVVVLS

SEQ ID NO: 20448 - protein, 13 aa, Severe acute respiratory syndrome-related coronavirus
  REGION 1..13: note = Table B: HLA-DRB1*08:04L
  source 1..13: note = Severe acute respiratory syndrome coronavirus 2
TGVLTESNKKFLP

SEQ ID NO: 20449 - protein, 13 aa, Severe acute respiratory syndrome-related coronavirus
  REGION 1..13: note = Table B: HLA-DRB1*08:04L
  source 1..13: note = Severe acute respiratory syndrome coronavirus 2
GVLTESNKKFLPF

SEQ ID NO: 20450 - protein, 13 aa, Severe acute respiratory syndrome-related coronavirus
  REGION 1..13: note = Table B: HLA-DRB1*08:04L HLA-DRB1*11:03L HLA-DRB1*07:01L
  source 1..13: note = Severe acute respiratory syndrome coronavirus 2
DIADTTDAVRDPQ

SEQ ID NO: 20451 - protein, 13 aa, Severe acute respiratory syndrome-related coronavirus
  REGION 1..13: note = Table B: HLA-DRB1*08:04L HLA-DPA1*01:03-B1*02:01L
  source 1..13: note = Severe acute respiratory syndrome coronavirus 2
TSNQVAVLYQDVN

SEQ ID NO: 20452 - protein, 12 aa, Severe acute respiratory syndrome-related coronavirus
  REGION 1..12: note = Table B: HLA-DRB1*08:04L HLA-DRB1*08:01L
  source 1..12: note = Severe acute respiratory syndrome coronavirus 2
LIGAEHVNNSYE

SEQ ID NO: 20453 - protein, 19 aa, Severe acute respiratory syndrome-related coronavirus
  REGION 1..19: note = Table B: HLA-DRB1*08:04L
  source 1..19: note = Severe acute respiratory syndrome coronavirus 2
TPPIKDFGGFNFSQILPDP

SEQ ID NO: 20454 - protein, 15 aa, Severe acute respiratory syndrome-related coronavirus
  REGION 1..15: note = Table B: HLA-DRB1*08:04L
  source 1..15: note = Severe acute respiratory syndrome coronavirus 2
NKVTLADAGFIKQYG

SEQ ID NO: 20455 - protein, 13 aa, Severe acute respiratory syndrome-related coronavirus
  REGION 1..13: note = Table B: HLA-DRB1*08:04L HLA-DRB1*08:01L HLA-DPA1*01:03-B1*104:01L
  source 1..13: note = Severe acute respiratory syndrome coronavirus 2
YRFNGIGVTQNVL

SEQ ID NO: 20456 - protein, 16 aa, Severe acute respiratory syndrome-related coronavirus
  REGION 1..16: note = Table B: HLA-DRB1*08:04L HLA-DRB1*09:01L
  source 1..16: note = Severe acute respiratory syndrome coronavirus 2
FNGIGVTQNVLYENQK

SEQ ID NO: 20457 - protein, 12 aa, Severe acute respiratory syndrome-related coronavirus
  REGION 1..12: note = Table B: HLA-DRB1*08:04L HLA-DRB3*02:01L HLA-DRB1*11:03L HLA-DRB1*11:04L HLA-DRB1*14:02L HLA-DRB1*08:01L HLA-DRB1*04:10L HLA-DRB1*12:02L HLA-DRB3*01:01L HLA-DRB1*08:03L
  source 1..12: note = Severe acute respiratory syndrome coronavirus 2
NVLYENQKLIAN

SEQ ID NO: 20458 - protein, 12 aa, Severe acute respiratory syndrome-related coronavirus
  REGION 1..12: note = Table B: HLA-DRB1*08:04L HLA-DPA1*01:03-B1*03:01L HLA-DRB1*11:04L HLA-DRB1*14:02L HLA-DRB1*08:01L HLA-DRB1*11:01L HLA-DQA1*05:05-B1*03:19L HLA-DPA1*01:03-B1*04:02L HLA-DRB3*01:01L HLA-DPA1*01:03-B1*02:01L
  REGION 1..12: note = CONT. FROM ABOVE: HLA-DQA1*05:05-B1*03:01L
  source 1..12: note = Severe acute respiratory syndrome coronavirus 2
VLYENQKLIANQ

SEQ ID NO: 20459 - protein, 13 aa, Severe acute respiratory syndrome-related coronavirus
  REGION 1..13: note = Table B: HLA-DRB1*08:04L
  source 1..13: note = Severe acute respiratory syndrome coronavirus 2
DSLSSTASALGKL

SEQ ID NO: 20460 - protein, 14 aa, Severe acute respiratory syndrome-related coronavirus
  REGION 1..14: note = Table B: HLA-DRB1*08:04L HLA-DRB1*08:01L
  source 1..14: note = Severe acute respiratory syndrome coronavirus 2
SSTASALGKLQDVV

SEQ ID NO: 20461 - protein, 13 aa, Severe acute respiratory syndrome-related coronavirus
  REGION 1..13: note = Table B: HLA-DRB1*08:04L HLA-DRB3*02:01L HLA-DRB1*11:03L HLA-DRB1*11:04L HLA-DRB1*07:01L HLA-DRB1*10:01L
  source 1..13: note = Severe acute respiratory syndrome coronavirus 2
LQDVVNQNAQALN

SEQ ID NO: 20462 - protein, 12 aa, Severe acute respiratory syndrome-related coronavirus
  REGION 1..12: note = Table B: HLA-DRB1*08:04L HLA-DRB3*02:01L HLA-DPA1*01:03-B1*03:01L HLA-DRB1*14:02L HLA-DQA1*05:05-B1*03:01L HLA-DRB1*04:08L
  source 1..12: note = Severe acute respiratory syndrome coronavirus 2
VVNQNAQALNTL

SEQ ID NO: 20463 - protein, 12 aa, Severe acute respiratory syndrome-related coronavirus
  REGION 1..12: note = Table B: HLA-DRB1*08:04L
  source 1..12: note = Severe acute respiratory syndrome coronavirus 2
QALNTLVKQLSS

SEQ ID NO: 20464 - protein, 13 aa, Severe acute respiratory syndrome-related coronavirus
  REGION 1..13: note = Table B: HLA-DRB1*08:04L HLA-DPA1*03:01-B1*04:02L HLA-DPA1*02:01-B1*13:01L
  source 1..13: note = Severe acute respiratory syndrome coronavirus 2
LVKQLSSNFGAIS

SEQ ID NO: 20465 - protein, 13 aa, Severe acute respiratory syndrome-related coronavirus
  REGION 1..13: note = Table B: HLA-DRB1*08:04L HLA-DRB1*08:77L
  source 1..13: note = Severe acute respiratory syndrome coronavirus 2
VKQLSSNFGAISS

SEQ ID NO: 20466 - protein, 14 aa, Severe acute respiratory syndrome-related coronavirus
  REGION 1..14: note = Table B: HLA-DRB1*08:04L HLA-DQA1*01:01-B1*05:01L HLA-DRB3*01:01L
  source 1..14: note = Severe acute respiratory syndrome coronavirus 2
ISSVLNDILSRLDK

SEQ ID NO: 20467 - protein, 13 aa, Severe acute respiratory syndrome-related coronavirus
  REGION 1..13: note = Table B: HLA-DRB1*08:04L HLA-DRB1*08:77L HLA-DPA1*01:03-B1*03:01L HLA-DPA1*03:01-B1*04:02L HLA-DRB1*11:03L HLA-DRB1*14:02L HLA-DQA1*01-B1*05L HLA-DRB1*04:10L HLA-DPA1*02:01-B1*13:01L HLA-DRB1*07:01L
  REGION 1..13: note = CONT. FROM ABOVE: HLA-DRB1*10:01L
  source 1..13: note = Severe acute respiratory syndrome coronavirus 2
EVQIDRLITGRLQ

SEQ ID NO: 20468 - protein, 14 aa, Severe acute respiratory syndrome-related coronavirus
  REGION 1..14: note = Table B: HLA-DRB1*08:04L HLA-DPA1*01:03-B1*104:01L
  source 1..14: note = Severe acute respiratory syndrome coronavirus 2
VFLHVTYVPAQEKN

SEQ ID NO: 20469 - protein, 13 aa, Severe acute respiratory syndrome-related coronavirus
  REGION 1..13: note = Table B: HLA-DRB1*08:04L HLA-DRB1*08:01L HLA-DRB1*04:08L
  source 1..13: note = Severe acute respiratory syndrome coronavirus 2
GTHWFVTQRNFYE

SEQ ID NO: 20470 - protein, 12 aa, Severe acute respiratory syndrome-related coronavirus
  REGION 1..12: note = Table B: HLA-DRB1*08:04L HLA-DRB1*12:02L HLA-DRB1*14:54L
  source 1..12: note = Severe acute respiratory syndrome coronavirus 2
NTVYDPLQPELD

SEQ ID NO: 20471 - protein, 15 aa, Severe acute respiratory syndrome-related coronavirus
  REGION 1..15: note = Table B: HLA-DRB1*08:04L HLA-DRB1*11:03L HLA-DRB1*11:01L HLA-DRB1*08:03L
  source 1..15: note = Severe acute respiratory syndrome coronavirus 2
KEELDKYFKNHTSPD

SEQ ID NO: 20472 - protein, 12 aa, Severe acute respiratory syndrome-related coronavirus
  REGION 1..12: note = Table B: HLA-DRB1*08:04L HLA-DPA1*01:03-B1*03:01L HLA-DRB1*11:03L HLA-DRB1*11:01L HLA-DRB1*04:10L HLA-DRB1*10:01L HLA-DRB1*15:03L
  source 1..12: note = Severe acute respiratory syndrome coronavirus 2
SGINASVVNIQK

SEQ ID NO: 20473 - protein, 12 aa, Severe acute respiratory syndrome-related coronavirus
  REGION 1..12: note = Table B: HLA-DRB1*08:04L HLA-DRB1*11:01L HLA-DPA1*01:03-B1*104:01L
  source 1..12: note = Severe acute respiratory syndrome coronavirus 2
GINASVVNIQKE

SEQ ID NO: 20474 - protein, 12 aa, Severe acute respiratory syndrome-related coronavirus
  REGION 1..12: note = Table B: HLA-DRB1*08:04L HLA-DRB1*11:03L HLA-DRB1*04:10L HLA-DRB3*01:01L HLA-DRB1*14:54L
  source 1..12: note = Severe acute respiratory syndrome coronavirus 2
LNEVAKNLNESL

SEQ ID NO: 20475 - protein, 13 aa, Severe acute respiratory syndrome-related coronavirus
  REGION 1..13: note = Table B: HLA-DRB1*08:04L HLA-DRB1*11:03L HLA-DRB1*14:17L
  source 1..13: note = Severe acute respiratory syndrome coronavirus 2
NEVAKNLNESLID

SEQ ID NO: 20476 - protein, 14 aa, Severe acute respiratory syndrome-related coronavirus
  REGION 1..14: note = Table B: HLA-DRB1*08:04L HLA-DQA1*01:01-B1*05:01L
  source 1..14: note = Severe acute respiratory syndrome coronavirus 2
EVAKNLNESLIDLQ

SEQ ID NO: 20477 - protein, 13 aa, Severe acute respiratory syndrome-related coronavirus
  REGION 1..13: note = Table B: HLA-DRB1*08:04L HLA-DRB1*04:10L
  source 1..13: note = Severe acute respiratory syndrome coronavirus 2
ESLIDLQELGKYE

SEQ ID NO: 20478 - protein, 13 aa, Severe acute respiratory syndrome-related coronavirus
  REGION 1..13: note = Table B: HLA-DRB1*08:04L
  source 1..13: note = Severe acute respiratory syndrome coronavirus 2
IDLQELGKYEQYI

SEQ ID NO: 20479 - protein, 12 aa, Severe acute respiratory syndrome-related coronavirus
  REGION 1..12: note = Table B: HLA-DRB1*08:04L HLA-DRB1*14:01L
  source 1..12: note = Severe acute respiratory syndrome coronavirus 2
LGKYEQYIKWPW

SEQ ID NO: 20480 - protein, 10 aa, Severe acute respiratory syndrome-related coronavirus
  REGION 1..10: note = Table B: HLA-DRB1*08:04L HLA-DRB1*14:01L HLA-DRB1*08:01L
  source 1..10: note = Severe acute respiratory syndrome coronavirus 2
IITLKKRWQL

SEQ ID NO: 20481 - protein, 13 aa, Severe acute respiratory syndrome-related coronavirus
  REGION 1..13: note = Table B: HLA-DRB1*08:04L HLA-DRB3*02:01L HLA-DRB1*08:01L HLA-DPA1*01:03-B1*02:01L
  source 1..13: note = Severe acute respiratory syndrome coronavirus 2
VYFLQSINFVRII

SEQ ID NO: 20482 - protein, 18 aa, Severe acute respiratory syndrome-related coronavirus
  REGION 1..18: note = Table B: HLA-DRB1*08:04L HLA-DRB3*02:01L
  source 1..18: note = Severe acute respiratory syndrome coronavirus 2
SPISEHDYQIGGYTEKWE

SEQ ID NO: 20483 - protein, 15 aa, Severe acute respiratory syndrome-related coronavirus
  REGION 1..15: note = Table B: HLA-DRB1*08:04L HLA-DRB1*11:02L HLA-DRB4*01:01L HLA-DPA1*01:03-B1*04:02L HLA-DRB1*12:02L HLA-DRB1*08:02L
  source 1..15: note = Severe acute respiratory syndrome coronavirus 2
SDYYQLYSTQLSTDT

SEQ ID NO: 20484 - protein, 12 aa, Severe acute respiratory syndrome-related coronavirus
  REGION 1..12: note = Table B: HLA-DRB1*08:04L HLA-DRB1*08:01L HLA-DRB1*04:08L
  source 1..12: note = Severe acute respiratory syndrome coronavirus 2
VTFFIYNKIVDE

SEQ ID NO: 20485 - protein, 17 aa, Severe acute respiratory syndrome-related coronavirus
  REGION 1..17: note = Table B: HLA-DRB1*08:04L
  source 1..17: note = Severe acute respiratory syndrome coronavirus 2
SSGVVNPVMEPIYDEPT

SEQ ID NO: 20486 - protein, 14 aa, Severe acute respiratory syndrome-related coronavirus
  REGION 1..14: note = Table B: HLA-DRB1*08:04L HLA-DPA1*01:03-B1*03:01L
  source 1..14: note = Severe acute respiratory syndrome coronavirus 2
YSRVKNLNSSRVPD

SEQ ID NO: 20487 - protein, 14 aa, Severe acute respiratory syndrome-related coronavirus
  REGION 1..14: note = Table B: HLA-DRB1*08:04L HLA-DQA1*01:01-B1*05:01L HLA-DRB1*09:01L HLA-DPA1*01:03-B1*104:01L
  source 1..14: note = Severe acute respiratory syndrome coronavirus 2
SRVKNLNSSRVPDL

SEQ ID NO: 20488 - protein, 13 aa, Severe acute respiratory syndrome-related coronavirus
  REGION 1..13: note = Table B: HLA-DRB1*08:04L HLA-DPA1*01:03-B1*02:01L
  source 1..13: note = Severe acute respiratory syndrome coronavirus 2
SNGTITVEELKKL

SEQ ID NO: 20489 - protein, 13 aa, Severe acute respiratory syndrome-related coronavirus
  REGION 1..13: note = Table B: HLA-DRB1*08:04L
  source 1..13: note = Severe acute respiratory syndrome coronavirus 2
GTITVEELKKLLE

SEQ ID NO: 20490 - protein, 11 aa, Severe acute respiratory syndrome-related coronavirus
  REGION 1..11: note = Table B: HLA-DRB1*08:04L HLA-DRB1*08:01L
  source 1..11: note = Severe acute respiratory syndrome coronavirus 2
TVEELKKLLEQ

SEQ ID NO: 20491 - protein, 13 aa, Severe acute respiratory syndrome-related coronavirus
  REGION 1..13: note = Table B: HLA-DRB1*08:04L
  source 1..13: note = Severe acute respiratory syndrome coronavirus 2
RNRFLYIIKLIFL

SEQ ID NO: 20492 - protein, 14 aa, Severe acute respiratory syndrome-related coronavirus
  REGION 1..14: note = Table B: HLA-DRB1*08:04L HLA-DRB1*03:01L HLA-DRB1*11:03L HLA-DRB1*13:01L
  source 1..14: note = Severe acute respiratory syndrome coronavirus 2
AVILRGHLRIAGHH

SEQ ID NO: 20493 - protein, 16 aa, Severe acute respiratory syndrome-related coronavirus
  REGION 1..16: note = Table B: HLA-DRB1*08:04L
  source 1..16: note = Severe acute respiratory syndrome coronavirus 2
EITVATSRTLSYYKLG

SEQ ID NO: 20494 - protein, 12 aa, Severe acute respiratory syndrome-related coronavirus
  REGION 1..12: note = Table B: HLA-DRB1*08:04L
  source 1..12: note = Severe acute respiratory syndrome coronavirus 2
LDYIINLIIKNL

SEQ ID NO: 20495 - protein, 16 aa, Severe acute respiratory syndrome-related coronavirus
  REGION 1..16: note = Table B: HLA-DRB1*08:04L
  source 1..16: note = Severe acute respiratory syndrome coronavirus 2
KSLTENKYSQLDEEQP

SEQ ID NO: 20496 - protein, 13 aa, Severe acute respiratory syndrome-related coronavirus
  REGION 1..13: note = Table B: HLA-DRB1*08:04L
  source 1..13: note = Severe acute respiratory syndrome coronavirus 2
LYHYQECVRGTTV

SEQ ID NO: 20497 - protein, 13 aa, Severe acute respiratory syndrome-related coronavirus
  REGION 1..13: note = Table B: HLA-DRB1*08:04L
  source 1..13: note = Severe acute respiratory syndrome coronavirus 2
YHYQECVRGTTVL

SEQ ID NO: 20498 - protein, 12 aa, Severe acute respiratory syndrome-related coronavirus
  REGION 1..12: note = Table B: HLA-DRB1*08:04L
  source 1..12: note = Severe acute respiratory syndrome coronavirus 2
NSPFHPLADNKF

SEQ ID NO: 20499 - protein, 13 aa, Severe acute respiratory syndrome-related coronavirus
  REGION 1..13: note = Table B: HLA-DRB1*08:04L HLA-DRB1*14:02L HLA-DQA1*05:05-B1*03:01L HLA-DRB1*07:01L HLA-DRB1*08:03L
  source 1..13: note = Severe acute respiratory syndrome coronavirus 2
YEDFLEYHDVRVV

SEQ ID NO: 20500 - protein, 12 aa, Severe acute respiratory syndrome-related coronavirus
  REGION 1..12: note = Table B: HLA-DRB1*08:04L HLA-DRB1*08:01L HLA-DRB1*04:08L
  source 1..12: note = Severe acute respiratory syndrome coronavirus 2
LEYHDVRVVLDF

SEQ ID NO: 20501 - protein, 18 aa, Severe acute respiratory syndrome-related coronavirus
  REGION 1..18: note = Table B: HLA-DRB1*08:04L HLA-DQA1*05:05-B1*03:19L HLA-DRB1*08:02L
  source 1..18: note = Severe acute respiratory syndrome coronavirus 2
SPDDQIGYYRRATRRIRG

SEQ ID NO: 20502 - protein, 15 aa, Severe acute respiratory syndrome-related coronavirus
  REGION 1..15: note = Table B: HLA-DRB1*08:04L HLA-DRB1*15:03L
  source 1..15: note = Severe acute respiratory syndrome coronavirus 2
PRWYFYYLGTGPEAG

SEQ ID NO: 20503 - protein, 14 aa, Severe acute respiratory syndrome-related coronavirus
  REGION 1..14: note = Table B: HLA-DRB1*08:04L HLA-DRB3*02:01L HLA-DPA1*03:01-B1*04:02L HLA-DRB1*03:01L HLA-DRB1*14:01L HLA-DRB1*08:01L HLA-DRB1*11:01L HLA-DQA1*01-B1*05L HLA-DRB1*09:01L HLA-DPA1*01:03-B1*04:02L HLA-DRB3*01:01L
  REGION 1..14: note = CONT. FROM ABOVE: HLA-DPA1*02:01-B1*13:01L HLA-DPA1*01:03-B1*104 :01L HLA-DPA1*01:02-B1*04:01L HLA-DRB1*07:01L HLA-DRB1*08:02L HL A-DRB1*08:03L
  source 1..14: note = Severe acute respiratory syndrome coronavirus 2
IIWVATEGALNTPK

SEQ ID NO: 20504 - protein, 17 aa, Severe acute respiratory syndrome-related coronavirus
  REGION 1..17: note = Table B: HLA-DRB1*08:04L HLA-DQA1*01-B1*05L HLA-DPA1*01:02-B1*04:01L
  source 1..17: note = Severe acute respiratory syndrome coronavirus 2
NPANNAAIVLQLPQGTT

SEQ ID NO: 20505 - protein, 11 aa, Severe acute respiratory syndrome-related coronavirus
  REGION 1..11: note = Table B: HLA-DRB1*08:04L HLA-DRB1*14:54L
  source 1..11: note = Severe acute respiratory syndrome coronavirus 2
LALLLLDRLNQ

SEQ ID NO: 20506 - protein, 15 aa, Severe acute respiratory syndrome-related coronavirus
  REGION 1..15: note = Table B: HLA-DRB1*08:04L HLA-DRB1*11:04L
  source 1..15: note = Severe acute respiratory syndrome coronavirus 2
QELIRQGTDYKHWPQ

SEQ ID NO: 20507 - protein, 12 aa, Severe acute respiratory syndrome-related coronavirus
  REGION 1..12: note = Table B: HLA-DRB1*08:04L HLA-DPA1*03:01-B1*04:02L HLA-DRB1*08:01L HLA-DRB1*12:01L HLA-DRB1*14:54L
  source 1..12: note = Severe acute respiratory syndrome coronavirus 2
ASAFFGMSRIGM

SEQ ID NO: 20508 - protein, 11 aa, Severe acute respiratory syndrome-related coronavirus
  REGION 1..11: note = Table B: HLA-DRB1*08:04L HLA-DRB1*14:01L HLA-DRB1*08:01L HLA-DPA1*03:01-B1*105:01L
  source 1..11: note = Severe acute respiratory syndrome coronavirus 2
AFFGMSRIGME

SEQ ID NO: 20509 - protein, 14 aa, Severe acute respiratory syndrome-related coronavirus
  REGION 1..14: note = Table B: HLA-DRB1*08:04L HLA-DRB1*08:01L
  source 1..14: note = Severe acute respiratory syndrome coronavirus 2
VTLLPAADLDDFSK

SEQ ID NO: 20510 - protein, 14 aa, Severe acute respiratory syndrome-related coronavirus
  REGION 1..14: note = Table B: HLA-DRB1*08:04L HLA-DPA1*01:03-B1*03:01L HLA-DRB1*14:01L HLA-DRB1*14:02L HLA-DPA1*02:01-B1*13:01L
  source 1..14: note = Severe acute respiratory syndrome coronavirus 2
DLDDFSKQLQQSMS

SEQ ID NO: 20511 - protein, 11 aa, Severe acute respiratory syndrome-related coronavirus
  REGION 1..11: note = Table B: HLA-DRB1*08:77L HLA-DRB1*16:01L
  source 1..11: note = Severe acute respiratory syndrome coronavirus 2
NGNKGAGGHSY

SEQ ID NO: 20512 - protein, 15 aa, Severe acute respiratory syndrome-related coronavirus
  REGION 1..15: note = Table B: HLA-DRB1*08:77L HLA-DRB3*02:01L HLA-DRB1*14:02L HLA-DRB1*12:02L HLA-DPA1*01:02-B1*04:01L
  source 1..15: note = Severe acute respiratory syndrome coronavirus 2
EAKKVKPTVVVNAAN

SEQ ID NO: 20513 - protein, 14 aa, Severe acute respiratory syndrome-related coronavirus
  REGION 1..14: note = Table B: HLA-DRB1*08:77L HLA-DRB1*03:01L HLA-DRB1*09:01L HLA-DPA1*01:03-B1*04:02L HLA-DRB1*07:01L HLA-DQA1*01:03-B1*06:01L
  source 1..14: note = Severe acute respiratory syndrome coronavirus 2
SSFLEMKSEKQVEQ

SEQ ID NO: 20514 - protein, 11 aa, Severe acute respiratory syndrome-related coronavirus
  REGION 1..11: note = Table B: HLA-DRB1*08:77L HLA-DQA1*05:05-B1*03:19L HLA-DQA1*05:01-B1*02:01L HLA-DQA1*03:01-B1*03:02L HLA-DPA1*01:03-B1*104:01L
  source 1..11: note = Severe acute respiratory syndrome coronavirus 2
QEILGTVSWNL

SEQ ID NO: 20515 - protein, 11 aa, Severe acute respiratory syndrome-related coronavirus
  REGION 1..11: note = Table B: HLA-DRB1*08:77L HLA-DQA1*05:05-B1*03:116L HLA-DRB1*10:01L
  source 1..11: note = Severe acute respiratory syndrome coronavirus 2
VVDYGARFYFY

SEQ ID NO: 20516 - protein, 13 aa, Severe acute respiratory syndrome-related coronavirus
  REGION 1..13: note = Table B: HLA-DRB1*08:77L HLA-DRB1*09:01L HLA-DPA1*01:03-B1*104:01L HLA-DRB1*07:01L HLA-DRB1*10:01L
  source 1..13: note = Severe acute respiratory syndrome coronavirus 2
NINLHTQVVDMSM

SEQ ID NO: 20517 - protein, 10 aa, Severe acute respiratory syndrome-related coronavirus
  REGION 1..10: note = Table B: HLA-DRB1*08:77L HLA-DPA1*01:03-B1*03:01L HLA-DRB1*03:01L HLA-DRB1*11:02L HLA-DQA1*01-B1*05L HLA-DQA1*05:05-B1*03:19M HLA-DQA1*05:01-B1*02:01L HLA-DPA1*01:03-B1*104:01L HLA-DRB1*10:01L HLA-DRB1*16:01L
  source 1..10: note = Severe acute respiratory syndrome coronavirus 2
TDVFYKENSY

SEQ ID NO: 20518 - protein, 11 aa, Severe acute respiratory syndrome-related coronavirus
  REGION 1..11: note = Table B: HLA-DRB1*08:77L HLA-DRB3*02:01L HLA-DRB1*11:03L HLA-DRB1*11:04L HLA-DRB1*11:01L HLA-DQA1*05:05-B1*03:116L HLA-DRB1*12:02L HLA-DPA1*01:03-B1*02:01L HLA-DRB1*10:01L
  source 1..11: note = Severe acute respiratory syndrome coronavirus 2
NSYTTTIKPVT

SEQ ID NO: 20519 - protein, 13 aa, Severe acute respiratory syndrome-related coronavirus
  REGION 1..13: note = Table B: HLA-DRB1*08:77L HLA-DPA1*01:03-B1*03:01L HLA-DRB1*03:01L HLA-DRB1*11:03L HLA-DRB1*14:02L HLA-DRB1*08:01L HLA-DRB4*01:01L HLA-DRB1*12:02L HLA-DQA1*05:05-B1*03:01L HLA-DQA1*01:03-B1*06:01L
  source 1..13: note = Severe acute respiratory syndrome coronavirus 2
NIKFADDLNQLTG

SEQ ID NO: 20520 - protein, 10 aa, Severe acute respiratory syndrome-related coronavirus
  REGION 1..10: note = Table B: HLA-DRB1*08:77L HLA-DPA1*01:03-B1*03:01L HLA-DRB1*03:01L HLA-DRB1*11:02L HLA-DQA1*01-B1*05L HLA-DQA1*05:05-B1*03:19M HLA-DQA1*05:01-B1*02:01M HLA-DRB4*01:01L HLA-DPA1*01:03-B1*04:01L
  REGION 1..10: note = CONT. FROM ABOVE: HLA-DPA1*01:03-B1*104:01L HLA-DRB1*10:01L HLA- DRB1*16:01L
  source 1..10: note = Severe acute respiratory syndrome coronavirus 2
ADDLNQLTGY

SEQ ID NO: 20521 - protein, 12 aa, Severe acute respiratory syndrome-related coronavirus
  REGION 1..12: note = Table B: HLA-DRB1*08:77L HLA-DRB3*02:01L HLA-DPA1*03:01-B1*04:02L HLA-DRB1*14:01L HLA-DPA1*03:01-B1*105:01L
  source 1..12: note = Severe acute respiratory syndrome coronavirus 2
FDVLKSEDAQGM

SEQ ID NO: 20522 - protein, 11 aa, Severe acute respiratory syndrome-related coronavirus
  REGION 1..11: note = Table B: HLA-DRB1*08:77L HLA-DRB3*02:01L HLA-DRB1*07:01L
  source 1..11: note = Severe acute respiratory syndrome coronavirus 2
TILRTTNGDFL

SEQ ID NO: 20523 - protein, 15 aa, Severe acute respiratory syndrome-related coronavirus
  REGION 1..15: note = Table B: HLA-DRB1*08:77L HLA-DRB1*11:03L HLA-DRB1*11:04L HLA-DRB1*11:01L HLA-DRB1*08:02L
  source 1..15: note = Severe acute respiratory syndrome coronavirus 2
TFYLTNDVSFLAHIQ

SEQ ID NO: 20524 - protein, 13 aa, Severe acute respiratory syndrome-related coronavirus
  REGION 1..13: note = Table B: HLA-DRB1*08:77L HLA-DRB3*02:01L HLA-DRB1*11:03L HLA-DRB1*11:04L HLA-DRB1*14:02L HLA-DRB1*11:01L HLA-DRB1*09:01L HLA-DPA1*01:03-B1*04:02L HLA-DPA1*01:03-B1*104:01L HLA-DRB1*07:01L
  source 1..13: note = Severe acute respiratory syndrome coronavirus 2
SNHNFLVQAGNVQ

SEQ ID NO: 20525 - protein, 13 aa, Severe acute respiratory syndrome-related coronavirus
  REGION 1..13: note = Table B: HLA-DRB1*08:77L HLA-DRB1*11:03L HLA-DRB1*11:04L HLA-DRB1*14:02L HLA-DRB1*08:01L HLA-DRB1*11:01L HLA-DRB4*01:01L HLA-DRB1*04:10L HLA-DRB3*01:01L HLA-DPA1*01:03-B1*02:01L HLA-DPA1*01:03-B1*104:01L HLA-DQA1*05:05-B1*03:01L
  source 1..13: note = Severe acute respiratory syndrome coronavirus 2
GSALLEDEFTPFD

SEQ ID NO: 20526 - protein, 13 aa, Severe acute respiratory syndrome-related coronavirus
  REGION 1..13: note = Table B: HLA-DRB1*08:77L HLA-DRB3*02:01L HLA-DPA1*03:01-B1*04:02L HLA-DRB1*11:03L HLA-DRB1*14:02L HLA-DRB5*01:01L HLA-DRB1*09:01L HLA-DPA1*01:03-B1*104:01L HLA-DRB1*07:01L
  source 1..13: note = Severe acute respiratory syndrome coronavirus 2
IISVTSNYSGVVT

SEQ ID NO: 20527 - protein, 10 aa, Severe acute respiratory syndrome-related coronavirus
  REGION 1..10: note = Table B: HLA-DRB1*08:77L HLA-DPA1*01:03-B1*03:01L HLA-DRB1*03:01L HLA-DRB1*11:02L HLA-DQA1*01-B1*05L HLA-DQA1*05:05-B1*03:19M HLA-DQA1*05:01-B1*02:01L HLA-DPA1*01:03-B1*104:01L HLA-DRB1*16:01L
  source 1..10: note = Severe acute respiratory syndrome coronavirus 2
ASEFSSLPSY

SEQ ID NO: 20528 - protein, 14 aa, Severe acute respiratory syndrome-related coronavirus
  REGION 1..14: note = Table B: HLA-DRB1*08:77L HLA-DPA1*03:01-B1*04:02L HLA-DRB1*03:01L HLA-DRB1*11:02L HLA-DRB1*11:03L HLA-DRB1*11:04L HLA-DRB1*14:02L HLA-DRB1*11:01L HLA-DQA1*05:05-B1*03:19L HLA-DPA1*03:01-B1*105:01L
  source 1..14: note = Severe acute respiratory syndrome coronavirus 2
NNIINNARDGCVPL

SEQ ID NO: 20529 - protein, 12 aa, Severe acute respiratory syndrome-related coronavirus
  REGION 1..12: note = Table B: HLA-DRB1*08:77L HLA-DPA1*01:03-B1*03:01L HLA-DRB1*08:01L HLA-DQA1*05:05-B1*03:19L HLA-DRB4*01:01L HLA-DRB1*09:01L HLA-DPA1*02:01-B1*13:01L
  source 1..12: note = Severe acute respiratory syndrome coronavirus 2
WEIQQVVDADSK

SEQ ID NO: 20530 - protein, 11 aa, Severe acute respiratory syndrome-related coronavirus
  REGION 1..11: note = Table B: HLA-DRB1*08:77L HLA-DRB1*12:02L
  source 1..11: note = Severe acute respiratory syndrome coronavirus 2
TALRANSAVKL

SEQ ID NO: 20531 - protein, 14 aa, Severe acute respiratory syndrome-related coronavirus
  REGION 1..14: note = Table B: HLA-DRB1*08:77L HLA-DRB1*14:01L
  source 1..14: note = Severe acute respiratory syndrome coronavirus 2
QAITVTPEANMDQE

SEQ ID NO: 20532 - protein, 16 aa, Severe acute respiratory syndrome-related coronavirus
  REGION 1..16: note = Table B: HLA-DRB1*08:77L HLA-DRB3*02:01L HLA-DPA1*03:01-B1*04:02L HLA-DRB1*14:01L HLA-DRB4*01:01L HLA-DPA1*01:03-B1*04:01L HLA-DPA1*01:03-B1*104:01L HLA-DRB1*07:01L
  source 1..16: note = Severe acute respiratory syndrome coronavirus 2
VTPEANMDQESFGGAS

SEQ ID NO: 20533 - protein, 13 aa, Severe acute respiratory syndrome-related coronavirus
  REGION 1..13: note = Table B: HLA-DRB1*08:77L HLA-DRB1*11:03L HLA-DRB1*11:04L HLA-DRB1*14:02L HLA-DRB1*11:01L HLA-DRB1*09:01L HLA-DRB3*01:01L HLA-DPA1*01:03-B1*02:01L HLA-DPA1*01:03-B1*104:01L HLA-DRB1*07:01L
  source 1..13: note = Severe acute respiratory syndrome coronavirus 2
DDYVYLPYPDPSR

SEQ ID NO: 20534 - protein, 13 aa, Severe acute respiratory syndrome-related coronavirus
  REGION 1..13: note = Table B: HLA-DRB1*08:77L HLA-DRB1*11:03L HLA-DRB4*01:01L HLA-DQA1*05:05-B1*03:116L HLA-DRB1*12:02L HLA-DRB1*07:01L HLA-DRB1*08:03L
  source 1..13: note = Severe acute respiratory syndrome coronavirus 2
LFAAETLKATEET

SEQ ID NO: 20535 - protein, 14 aa, Severe acute respiratory syndrome-related coronavirus
  REGION 1..14: note = Table B: HLA-DRB1*08:77L HLA-DPA1*01:03-B1*03:01L HLA-DRB1*03:01L HLA-DRB1*11:01L HLA-DQA1*05:05-B1*03:19L HLA-DRB1*09:01L HLA-DRB3*01:01L HLA-DPA1*03:01-B1*105:01L HLA-DRB1*07:01L HLA-DRB1*08:02L
  source 1..14: note = Severe acute respiratory syndrome coronavirus 2
MQKYSTLQGPPGTG

SEQ ID NO: 20536 - protein, 17 aa, Severe acute respiratory syndrome-related coronavirus
  REGION 1..17: note = Table B: HLA-DRB1*08:77L HLA-DRB1*03:01L HLA-DRB4*01:01L HLA-DRB1*12:02L HLA-DRB1*15:01L
  source 1..17: note = Severe acute respiratory syndrome coronavirus 2
YPSARIVYTACSHAAVD

SEQ ID NO: 20537 - protein, 10 aa, Severe acute respiratory syndrome-related coronavirus
  REGION 1..10: note = Table B: HLA-DRB1*08:77L HLA-DPA1*01:03-B1*03:01L HLA-DRB1*03:01L HLA-DQA1*01-B1*05L HLA-DQA1*05:05-B1*03:19M HLA-DQA1*05:01-B1*02:01L HLA-DPA1*01:03-B1*104:01L HLA-DRB1*16:01L
  source 1..10: note = Severe acute respiratory syndrome coronavirus 2
FDEISMATNY

SEQ ID NO: 20538 - protein, 13 aa, Severe acute respiratory syndrome-related coronavirus
  REGION 1..13: note = Table B: HLA-DRB1*08:77L
  source 1..13: note = Severe acute respiratory syndrome coronavirus 2
THLSVDTKFKTEG

SEQ ID NO: 20539 - protein, 15 aa, Severe acute respiratory syndrome-related coronavirus
  REGION 1..15: note = Table B: HLA-DRB1*08:77L HLA-DRB1*03:01L HLA-DQA1*01:01-B1*05:01L HLA-DRB4*01:01L HLA-DQA1*05:05-B1*03:116L HLA-DRB1*04:10L
  source 1..15: note = Severe acute respiratory syndrome coronavirus 2
IGFDYVYNPFMIDVQ

SEQ ID NO: 20540 - protein, 14 aa, Severe acute respiratory syndrome-related coronavirus
  REGION 1..14: note = Table B: HLA-DRB1*08:77L HLA-DRB1*03:01L HLA-DRB1*11:02L HLA-DPA1*01:03-B1*04:01L HLA-DRB1*09:01L HLA-DPA1*01:03-B1*02:01L HLA-DRB1*08:02L
  source 1..14: note = Severe acute respiratory syndrome coronavirus 2
VEWKFYDAQPCSDK

SEQ ID NO: 20541 - protein, 15 aa, Severe acute respiratory syndrome-related coronavirus
  REGION 1..15: note = Table B: HLA-DRB1*08:77L HLA-DRB3*02:01L HLA-DPA1*03:01-B1*04:02L HLA-DRB1*03:01L HLA-DRB1*11:02L HLA-DRB1*11:03L HLA-DRB1*14:02L HLA-DRB1*08:01L HLA-DRB4*01:01L HLA-DRB1*09:01L HLA-DPA1*01:03-B1*04:02L HLA-DRB3*01:01L
  REGION 1..15: note = CONT. FROM ABOVE: HLA-DPA1*01:03-B1*104:01L HLA-DRB1*08:02L HLA- DRB1*08:03L
  source 1..15: note = Severe acute respiratory syndrome coronavirus 2
DTRVLSNLNLPGCDG

SEQ ID NO: 20542 - protein, 12 aa, Severe acute respiratory syndrome-related coronavirus
  REGION 1..12: note = Table B: HLA-DRB1*08:77L HLA-DRB3*02:01L HLA-DRB1*11:02L HLA-DRB1*14:02L HLA-DRB4*01:01L HLA-DPA1*01:03-B1*04:01L HLA-DQA1*05:05-B1*03:116L HLA-DRB1*09:01L HLA-DRB3*01:01L HLA-DPA1*01:03-B1*02:01L HLA-DPA1*01:03-B1*104:01L
  REGION 1..12: note = CONT. FROM ABOVE: HLA-DRB1*07:01L HLA-DRB1*08:02L
  source 1..12: note = Severe acute respiratory syndrome coronavirus 2
WNTFTRLQSLEN

SEQ ID NO: 20543 - protein, 13 aa, Severe acute respiratory syndrome-related coronavirus
  REGION 1..13: note = Table B: HLA-DRB1*08:77L HLA-DRB1*11:02L HLA-DPA1*01:03-B1*02:01L
  source 1..13: note = Severe acute respiratory syndrome coronavirus 2
NVAFNVVNKGHFD

SEQ ID NO: 20544 - protein, 13 aa, Severe acute respiratory syndrome-related coronavirus
  REGION 1..13: note = Table B: HLA-DRB1*08:77L HLA-DRB1*03:01L HLA-DRB1*11:02L HLA-DRB1*13:01L
  source 1..13: note = Severe acute respiratory syndrome coronavirus 2
VAFNVVNKGHFDG

SEQ ID NO: 20545 - protein, 15 aa, Severe acute respiratory syndrome-related coronavirus
  REGION 1..15: note = Table B: HLA-DRB1*08:77L HLA-DRB1*11:02L HLA-DRB4*01:01L
  source 1..15: note = Severe acute respiratory syndrome coronavirus 2
ESPFELEDFIPMDST

SEQ ID NO: 20546 - protein, 11 aa, Severe acute respiratory syndrome-related coronavirus
  REGION 1..11: note = Table B: HLA-DRB1*08:77L HLA-DRB1*03:01L HLA-DQA1*01-B1*05L HLA-DQA1*05:05-B1*03:19L HLA-DPA1*01:03-B1*04:02L HLA-DQA1*01:03-B1*06:01L
  source 1..11: note = Severe acute respiratory syndrome coronavirus 2
VAPGTAVLRQW

SEQ ID NO: 20547 - protein, 13 aa, Severe acute respiratory syndrome-related coronavirus
  REGION 1..13: note = Table B: HLA-DRB1*08:77L HLA-DRB3*02:01L HLA-DPA1*01:03-B1*03:01L
  source 1..13: note = Severe acute respiratory syndrome coronavirus 2
KLALGGSVAIKIT

SEQ ID NO: 20548 - protein, 13 aa, Severe acute respiratory syndrome-related coronavirus
  REGION 1..13: note = Table B: HLA-DRB1*08:77L HLA-DRB1*11:03L HLA-DQA1*05:05-B1*03:116L HLA-DRB1*09:01L HLA-DRB1*12:02L HLA-DRB1*08:03L
  source 1..13: note = Severe acute respiratory syndrome coronavirus 2
GVYFASTEKSNII

SEQ ID NO: 20549 - protein, 13 aa, Severe acute respiratory syndrome-related coronavirus
  REGION 1..13: note = Table B: HLA-DRB1*08:77L HLA-DRB1*11:03L HLA-DRB1*11:01L HLA-DRB3*01:01L HLA-DRB1*08:03L
  source 1..13: note = Severe acute respiratory syndrome coronavirus 2
VYFASTEKSNIIR

SEQ ID NO: 20550 - protein, 15 aa, Severe acute respiratory syndrome-related coronavirus
  REGION 1..15: note = Table B: HLA-DRB1*08:77L HLA-DRB1*11:02L HLA-DRB1*09:01L HLA-DPA1*01:03-B1*104:01L HLA-DRB1*15:01L
  source 1..15: note = Severe acute respiratory syndrome coronavirus 2
LKSFTVEKGIYQTSN

SEQ ID NO: 20551 - protein, 11 aa, Severe acute respiratory syndrome-related coronavirus
  REGION 1..11: note = Table B: HLA-DRB1*08:77L HLA-DQA1*05:01-B1*02:01L HLA-DPA1*01:03-B1*04:01L
  source 1..11: note = Severe acute respiratory syndrome coronavirus 2
RVQPTESIVRF

SEQ ID NO: 20552 - protein, 14 aa, Severe acute respiratory syndrome-related coronavirus
  REGION 1..14: note = Table B: HLA-DRB1*08:77L HLA-DRB1*14:02L HLA-DRB1*11:01L HLA-DRB4*01:01L HLA-DRB1*09:01L
  source 1..14: note = Severe acute respiratory syndrome coronavirus 2
ADYSVLYNSASFST

SEQ ID NO: 20553 - protein, 14 aa, Severe acute respiratory syndrome-related coronavirus
  REGION 1..14: note = Table B: HLA-DRB1*08:77L HLA-DRB1*03:01L HLA-DRB1*11:03L HLA-DRB1*11:01L HLA-DRB4*01:01L HLA-DPA1*01:03-B1*04:01L HLA-DRB1*09:01L HLA-DPA1*01:03-B1*02:01L HLA-DPA1*01:03-B1*104:01L HLA-DRB1*07:01L HLA-DRB1*10:01L
  source 1..14: note = Severe acute respiratory syndrome coronavirus 2
TNVYADSFVIRGDE

SEQ ID NO: 20554 - protein, 13 aa, Severe acute respiratory syndrome-related coronavirus
  REGION 1..13: note = Table B: HLA-DRB1*08:77L HLA-DRB3*02:01L HLA-DRB1*11:03L HLA-DRB1*14:02L HLA-DQA1*01:01-B1*05:01L HLA-DRB1*11:01L HLA-DQA1*05:05-B1*03:19L HLA-DPA1*01:03-B1*04:02L HLA-DRB1*12:02L HLA-DRB3*01:01L HLA-DRB1*10:01L HLA-DRB1*08:02L
  source 1..13: note = Severe acute respiratory syndrome coronavirus 2
DLLFNKVTLADAG

SEQ ID NO: 20555 - protein, 12 aa, Severe acute respiratory syndrome-related coronavirus
  REGION 1..12: note = Table B: HLA-DRB1*08:77L HLA-DRB3*02:01L HLA-DPA1*01:03-B1*03:01L HLA-DRB1*11:03L HLA-DQA1*01:01-B1*05:01L HLA-DQA1*01-B1*05L HLA-DRB1*04:10L HLA-DRB1*09:01L HLA-DPA1*02:01-B1*13:01L HLA-DRB1*07:01L
  REGION 1..12: note = CONT. FROM ABOVE: HLA-DRB1*04:08L
  source 1..12: note = Severe acute respiratory syndrome coronavirus 2
NKVTLADAGFIK

SEQ ID NO: 20556 - protein, 11 aa, Severe acute respiratory syndrome-related coronavirus
  REGION 1..11: note = Table B: HLA-DRB1*08:77L
  source 1..11: note = Severe acute respiratory syndrome coronavirus 2
ALLAGTITSGW

SEQ ID NO: 20557 - protein, 15 aa, Severe acute respiratory syndrome-related coronavirus
  REGION 1..15: note = Table B: HLA-DRB1*08:77L HLA-DRB3*02:01L HLA-DRB1*11:02L HLA-DQA1*01-B1*05L HLA-DPA1*01:03-B1*04:01L HLA-DRB1*09:01L HLA-DRB1*12:02L HLA-DRB1*08:02L
  source 1..15: note = Severe acute respiratory syndrome coronavirus 2
TQQLIRAAEIRASAN

SEQ ID NO: 20558 - protein, 15 aa, Severe acute respiratory syndrome-related coronavirus
  REGION 1..15: note = Table B: HLA-DRB1*08:77L HLA-DPA1*03:01-B1*04:02L HLA-DRB1*11:02L HLA-DQA1*01:01-B1*05:01L HLA-DRB1*09:01L HLA-DPA1*01:03-B1*104:01L HLA-DRB1*08:02L
  source 1..15: note = Severe acute respiratory syndrome coronavirus 2
GKGYHLMSFPQSAPH

SEQ ID NO: 20559 - protein, 18 aa, Severe acute respiratory syndrome-related coronavirus
  REGION 1..18: note = Table B: HLA-DRB1*08:77L HLA-DRB1*03:01L HLA-DRB1*11:02L HLA-DRB1*11:03L HLA-DRB1*11:04L HLA-DRB4*01:01L HLA-DPA1*01:03-B1*04:01L HLA-DRB1*04:10L HLA-DRB1*09:01L HLA-DRB3*01:01L HLA-DPA1*01:03-B1*02:01L HLA-DRB1*08:02L
  source 1..18: note = Severe acute respiratory syndrome coronavirus 2
VPAQEKNFTTAPAICHDG

SEQ ID NO: 20560 - protein, 15 aa, Severe acute respiratory syndrome-related coronavirus
  REGION 1..15: note = Table B: HLA-DRB1*08:77L HLA-DRB1*13:01L HLA-DRB4*01:01L
  source 1..15: note = Severe acute respiratory syndrome coronavirus 2
GTHWFVTQRNFYEPQ

SEQ ID NO: 20561 - protein, 11 aa, Severe acute respiratory syndrome-related coronavirus
  REGION 1..11: note = Table B: HLA-DRB1*08:77L HLA-DRB1*03:01L HLA-DRB1*11:02L HLA-DRB1*14:02L HLA-DQA1*01-B1*05L HLA-DRB4*01:01L HLA-DPA1*01:03-B1*04:01L HLA-DRB1*16:01L HLA-DRB1*15:03L
  source 1..11: note = Severe acute respiratory syndrome coronavirus 2
VAAGLEAPFLY

SEQ ID NO: 20562 - protein, 12 aa, Severe acute respiratory syndrome-related coronavirus
  REGION 1..12: note = Table B: HLA-DRB1*08:77L HLA-DPA1*01:03-B1*03:01L HLA-DRB1*14:01L HLA-DRB1*11:03L HLA-DRB1*11:04L HLA-DRB5*01:01L HLA-DQA1*05:05-B1*03:19L HLA-DRB1*12:02L HLA-DRB1*10:01L HLA-DQA1*01:03-B1*06:01L HLA-DRB1*04:08L
  source 1..12: note = Severe acute respiratory syndrome coronavirus 2
STQLSTDTGVEH

SEQ ID NO: 20563 - protein, 12 aa, Severe acute respiratory syndrome-related coronavirus
  REGION 1..12: note = Table B: HLA-DRB1*08:77L HLA-DRB3*02:01L HLA-DPA1*01:03-B1*03:01L HLA-DRB1*11:03L HLA-DRB1*12:02L HLA-DPA1*02:01-B1*13:01L HLA-DRB1*07:01L
  source 1..12: note = Severe acute respiratory syndrome coronavirus 2
VKNLNSSRVPDL

SEQ ID NO: 20564 - protein, 11 aa, Severe acute respiratory syndrome-related coronavirus
  REGION 1..11: note = Table B: HLA-DRB1*08:77L HLA-DRB3*02:01L HLA-DPA1*01:03-B1*03:01L HLA-DQA1*01-B1*05L HLA-DRB4*01:01L HLA-DQA1*03:01-B1*03:02L HLA-DPA1*01:03-B1*104:01L HLA-DRB1*16:01L
  source 1..11: note = Severe acute respiratory syndrome coronavirus 2
EEVQELYSPIF

SEQ ID NO: 20565 - protein, 10 aa, Severe acute respiratory syndrome-related coronavirus
  REGION 1..10: note = Table B: HLA-DRB1*08:77L HLA-DPA1*01:03-B1*03:01L HLA-DRB1*03:01L HLA-DRB1*11:02L HLA-DQA1*01-B1*05L HLA-DQA1*05:05-B1*03:19M HLA-DQA1*05:01-B1*02:01L HLA-DPA1*01:03-B1*104:01L HLA-DRB1*16:01L
  source 1..10: note = Severe acute respiratory syndrome coronavirus 2
VDDPCPIHFY

SEQ ID NO: 20566 - protein, 13 aa, Severe acute respiratory syndrome-related coronavirus
  REGION 1..13: note = Table B: HLA-DRB1*08:77L HLA-DRB3*02:01L HLA-DPA1*03:01-B1*04:02L HLA-DRB1*11:03L HLA-DQA1*01:01-B1*05:01L HLA-DQA1*01-B1*05L HLA-DRB1*09:01L HLA-DRB1*12:02L HLA-DRB3*01:01L HLA-DPA1*01:03-B1*02:01L
  REGION 1..13: note = CONT. FROM ABOVE: HLA-DPA1*01:03-B1*104:01L HLA-DRB1*07:01L HLA- DRB1*08:02L HLA-DRB1*08:03L
  source 1..13: note = Severe acute respiratory syndrome coronavirus 2
ASWFTALTQHGKE

SEQ ID NO: 20567 - protein, 16 aa, Severe acute respiratory syndrome-related coronavirus
  REGION 1..16: note = Table B: HLA-DRB1*08:77L HLA-DRB1*13:01L HLA-DQA1*05:05-B1*03:116L HLA-DRB1*15:01L
  source 1..16: note = Severe acute respiratory syndrome coronavirus 2
GTDYKHWPQIAQFAPS

SEQ ID NO: 20568 - protein, 16 aa, Severe acute respiratory syndrome-related coronavirus
  REGION 1..16: note = Table B: HLA-DRB1*08:77L HLA-DRB3*02:01L HLA-DRB1*11:02L HLA-DRB4*01:01L HLA-DQA1*05:05-B1*03:116L HLA-DRB1*04:10L HLA-DRB1*09:01L HLA-DRB1*08:02L
  source 1..16: note = Severe acute respiratory syndrome coronavirus 2
DPNFKDQVILLNKHID

SEQ ID NO: 20569 - protein, 11 aa, Severe acute respiratory syndrome-related coronavirus
  REGION 1..11: note = Table B: HLA-DRB3*02:01L HLA-DRB1*08:01L HLA-DRB1*09:01L HLA-DRB1*08:03L
  source 1..11: note = Severe acute respiratory syndrome coronavirus 2
GVLPQLEQPYV

SEQ ID NO: 20570 - protein, 18 aa, Severe acute respiratory syndrome-related coronavirus
  REGION 1..18: note = Table B: HLA-DRB3*02:01L HLA-DRB1*14:02L HLA-DRB4*01:01L
  source 1..18: note = Severe acute respiratory syndrome coronavirus 2
APHGHVMVELVAELEGIQ

SEQ ID NO: 20571 - protein, 13 aa, Severe acute respiratory syndrome-related coronavirus
  REGION 1..13: note = Table B: HLA-DRB3*02:01L HLA-DRB1*11:02L HLA-DRB1*11:03L HLA-DQA1*01:01-B1*05:01L HLA-DRB1*09:01L HLA-DRB1*12:02L HLA-DRB1*07:01L HLA-DRB1*08:02L HLA-DRB1*08:03L
  source 1..13: note = Severe acute respiratory syndrome coronavirus 2
IAWYTERSEKSYE

SEQ ID NO: 20572 - protein, 13 aa, Severe acute respiratory syndrome-related coronavirus
  REGION 1..13: note = Table B: HLA-DRB3*02:01L
  source 1..13: note = Severe acute respiratory syndrome coronavirus 2
WYTERSEKSYELQ

SEQ ID NO: 20573 - protein, 18 aa, Severe acute respiratory syndrome-related coronavirus
  REGION 1..18: note = Table B: HLA-DRB3*02:01L HLA-DRB1*11:02L HLA-DRB1*10:01L
  source 1..18: note = Severe acute respiratory syndrome coronavirus 2
LPQNAVVKIYCPACHNSE

SEQ ID NO: 20574 - protein, 12 aa, Severe acute respiratory syndrome-related coronavirus
  REGION 1..12: note = Table B: HLA-DRB3*02:01L HLA-DPA1*03:01-B1*04:02L HLA-DRB1*14:01L HLA-DPA1*03:01-B1*105:01L
  source 1..12: note = Severe acute respiratory syndrome coronavirus 2
VNINIVGDFKLN

SEQ ID NO: 20575 - protein, 13 aa, Severe acute respiratory syndrome-related coronavirus
  REGION 1..13: note = Table B: HLA-DRB3*02:01L HLA-DRB1*11:03L HLA-DQA1*05:01-B1*02:01L HLA-DPA1*01:03-B1*104:01L HLA-DQA1*05:05-B1*03:01L HLA-DRB1*10:01L
  source 1..13: note = Severe acute respiratory syndrome coronavirus 2
GLDYKAFKQIVES

SEQ ID NO: 20576 - protein, 15 aa, Severe acute respiratory syndrome-related coronavirus
  REGION 1..15: note = Table B: HLA-DRB3*02:01L HLA-DRB1*15:01L
  source 1..15: note = Severe acute respiratory syndrome coronavirus 2
LKPVLDWLEEKFKEG

SEQ ID NO: 20577 - protein, 16 aa, Severe acute respiratory syndrome-related coronavirus
  REGION 1..16: note = Table B: HLA-DRB3*02:01L HLA-DQA1*05:05-B1*03:116L HLA-DPA1*01:03-B1*104:01L
  source 1..16: note = Severe acute respiratory syndrome coronavirus 2
GGQIVTCAKEIKESVQ

SEQ ID NO: 20578 - protein, 15 aa, Severe acute respiratory syndrome-related coronavirus
  REGION 1..15: note = Table B: HLA-DRB3*02:01L
  source 1..15: note = Severe acute respiratory syndrome coronavirus 2
TEEVVLKTGDLQPLE

SEQ ID NO: 20579 - protein, 16 aa, Severe acute respiratory syndrome-related coronavirus
  REGION 1..16: note = Table B: HLA-DRB3*02:01L
  source 1..16: note = Severe acute respiratory syndrome coronavirus 2
KVTFGDDTVIEVQGYK

SEQ ID NO: 20580 - protein, 16 aa, Severe acute respiratory syndrome-related coronavirus
  REGION 1..16: note = Table B: HLA-DRB3*02:01L HLA-DRB1*14:02L HLA-DQA1*05:05-B1*03:19L HLA-DPA1*01:03-B1*04:02L HLA-DPA1*01:03-B1*104:01L HLA-DRB1*08:03L
  source 1..16: note = Severe acute respiratory syndrome coronavirus 2
VIKTLQPVSELLTPLG

SEQ ID NO: 20581 - protein, 18 aa, Severe acute respiratory syndrome-related coronavirus
  REGION 1..18: note = Table B: HLA-DRB3*02:01L HLA-DPA1*03:01-B1*04:02L HLA-DPA1*01:03-B1*04:01L HLA-DQA1*05:05-B1*03:116L HLA-DPA1*01:03-B1*104:01L HLA-DPA1*01:02-B1*04:01L HLA-DRB1*08:02L
  source 1..18: note = Severe acute respiratory syndrome coronavirus 2
EPSTQYEYGTEDDYQGKP

SEQ ID NO: 20582 - protein, 15 aa, Severe acute respiratory syndrome-related coronavirus
  REGION 1..15: note = Table B: HLA-DRB3*02:01L HLA-DRB1*11:04L HLA-DRB1*08:02L
  source 1..15: note = Severe acute respiratory syndrome coronavirus 2
TEDDYQGKPLEFGAT

SEQ ID NO: 20583 - protein, 13 aa, Severe acute respiratory syndrome-related coronavirus
  REGION 1..13: note = Table B: HLA-DRB3*02:01L HLA-DPA1*01:03-B1*03:01L HLA-DRB1*11:02L HLA-DRB1*11:03L HLA-DRB1*11:04L HLA-DRB1*14:02L HLA-DQA1*01:01-B1*05:01L HLA-DQA1*05:01-B1*02:01L HLA-DQA1*05:05-B1*03:116L HLA-DRB1*04:10L HLA-DRB3*01:01L
  REGION 1..13: note = CONT. FROM ABOVE: HLA-DRB1*14:54L HLA-DPA1*01:03-B1*104:01L HLA- DRB1*10:01L HLA-DRB1*08:02L
  source 1..13: note = Severe acute respiratory syndrome coronavirus 2
VNSFSGYLKLTDN

SEQ ID NO: 20584 - protein, 13 aa, Severe acute respiratory syndrome-related coronavirus
  REGION 1..13: note = Table B: HLA-DRB3*02:01L HLA-DRB1*11:04L HLA-DRB1*14:02L HLA-DRB1*11:01L HLA-DPA1*01:03-B1*04:01L HLA-DPA1*01:03-B1*04:02L HLA-DRB3*01:01L HLA-DPA1*01:03-B1*104:01L HLA-DRB1*07:01L HLA-DRB1*10:01L
  REGION 1..13: note = CONT. FROM ABOVE: HLA-DRB1*08:03L
  source 1..13: note = Severe acute respiratory syndrome coronavirus 2
VYIKNADIVEEAK

SEQ ID NO: 20585 - protein, 13 aa, Severe acute respiratory syndrome-related coronavirus
  REGION 1..13: note = Table B: HLA-DRB3*02:01L HLA-DPA1*01:03-B1*03:01L HLA-DRB1*14:02L HLA-DRB1*11:01L HLA-DRB5*01:01L HLA-DRB1*04:10L HLA-DRB1*09:01L HLA-DRB3*01:01L HLA-DPA1*02:01-B1*13:01L HLA-DPA1*01:02-B1*04:01L HLA-DRB1*10:01L
  REGION 1..13: note = CONT. FROM ABOVE: HLA-DQA1*01:03-B1*06:01L HLA-DRB1*08:03L
  source 1..13: note = Severe acute respiratory syndrome coronavirus 2
ANVYLKHGGGVAG

SEQ ID NO: 20586 - protein, 15 aa, Severe acute respiratory syndrome-related coronavirus
  REGION 1..15: note = Table B: HLA-DRB3*02:01L
  source 1..15: note = Severe acute respiratory syndrome coronavirus 2
DTVRTNVYLAVFDKN

SEQ ID NO: 20587 - protein, 13 aa, Severe acute respiratory syndrome-related coronavirus
  REGION 1..13: note = Table B: HLA-DRB3*02:01L
  source 1..13: note = Severe acute respiratory syndrome coronavirus 2
DKNLYDKLVSSFL

SEQ ID NO: 20588 - protein, 16 aa, Severe acute respiratory syndrome-related coronavirus
  REGION 1..16: note = Table B: HLA-DRB3*02:01L HLA-DRB1*14:02L HLA-DQA1*05:05-B1*03:19L
  source 1..16: note = Severe acute respiratory syndrome coronavirus 2
YDKLVSSFLEMKSEKQ

SEQ ID NO: 20589 - protein, 14 aa, Severe acute respiratory syndrome-related coronavirus
  REGION 1..14: note = Table B: HLA-DRB3*02:01L HLA-DRB1*03:01L HLA-DRB1*11:02L HLA-DPA1*01:03-B1*104:01L
  source 1..14: note = Severe acute respiratory syndrome coronavirus 2
VSSFLEMKSEKQVE

SEQ ID NO: 20590 - protein, 16 aa, Severe acute respiratory syndrome-related coronavirus
  REGION 1..16: note = Table B: HLA-DRB3*02:01L HLA-DRB1*11:02L HLA-DPA1*01:03-B1*04:01L HLA-DRB1*09:01L HLA-DRB1*08:03L HLA-DRB1*15:01L
  source 1..16: note = Severe acute respiratory syndrome coronavirus 2
ENLLLYIDINGNLHPD

SEQ ID NO: 20591 - protein, 14 aa, Severe acute respiratory syndrome-related coronavirus
  REGION 1..14: note = Table B: HLA-DRB3*02:01L HLA-DPA1*01:03-B1*04:02L HLA-DPA1*01:03-B1*104:01L
  source 1..14: note = Severe acute respiratory syndrome coronavirus 2
YIDINGNLHPDSAT

SEQ ID NO: 20592 - protein, 14 aa, Severe acute respiratory syndrome-related coronavirus
  REGION 1..14: note = Table B: HLA-DRB3*02:01L HLA-DRB4*01:01L HLA-DPA1*01:03-B1*04:02L
  source 1..14: note = Severe acute respiratory syndrome coronavirus 2
DAPYIVGDVVQEGV

SEQ ID NO: 20593 - protein, 15 aa, Severe acute respiratory syndrome-related coronavirus
  REGION 1..15: note = Table B: HLA-DRB3*02:01L
  source 1..15: note = Severe acute respiratory syndrome coronavirus 2
AKALRKVPTDNYITT

SEQ ID NO: 20594 - protein, 13 aa, Severe acute respiratory syndrome-related coronavirus
  REGION 1..13: note = Table B: HLA-DRB3*02:01L HLA-DRB1*11:01L HLA-DPA1*01:03-B1*04:02L HLA-DRB3*01:01L HLA-DPA1*01:03-B1*104:01L HLA-DPA1*01:02-B1*04:01L HLA-DRB1*07:01L HLA-DQA1*01:03-B1*06:01L HLA-DRB1*08:02L
  source 1..13: note = Severe acute respiratory syndrome coronavirus 2
KSAFYILPSIISN

SEQ ID NO: 20595 - protein, 16 aa, Severe acute respiratory syndrome-related coronavirus
  REGION 1..16: note = Table B: HLA-DRB3*02:01L HLA-DPA1*03:01-B1*04:02L HLA-DRB1*03:01L HLA-DRB1*11:02L HLA-DRB1*11:03L HLA-DQA1*01-B1*05L HLA-DPA1*01:03-B1*04:01L HLA-DRB1*09:01L
  source 1..16: note = Severe acute respiratory syndrome coronavirus 2
IQRKYKGIKIQEGVVD

SEQ ID NO: 20596 - protein, 12 aa, Severe acute respiratory syndrome-related coronavirus
  REGION 1..12: note = Table B: HLA-DRB3*02:01L HLA-DRB1*14:01L HLA-DRB1*14:02L HLA-DPA1*02:01-B1*13:01L
  source 1..12: note = Severe acute respiratory syndrome coronavirus 2
IQEGVVDYGARF

SEQ ID NO: 20597 - protein, 16 aa, Severe acute respiratory syndrome-related coronavirus
  REGION 1..16: note = Table B: HLA-DRB3*02:01L HLA-DRB4*01:01L
  source 1..16: note = Severe acute respiratory syndrome coronavirus 2
SKTTVASLINTLNDLN

SEQ ID NO: 20598 - protein, 14 aa, Severe acute respiratory syndrome-related coronavirus
  REGION 1..14: note = Table B: HLA-DRB3*02:01L HLA-DPA1*03:01-B1*04:02L
  source 1..14: note = Severe acute respiratory syndrome coronavirus 2
AVTAYNGYLTSSSK

SEQ ID NO: 20599 - protein, 15 aa, Severe acute respiratory syndrome-related coronavirus
  REGION 1..15: note = Table B: HLA-DRB3*02:01L HLA-DRB1*14:01L HLA-DRB1*11:01L HLA-DRB1*04:10L HLA-DRB3*01:01L HLA-DRB1*08:03L
  source 1..15: note = Severe acute respiratory syndrome coronavirus 2
AGSYKDWSYSGQSTQ

SEQ ID NO: 20600 - protein, 14 aa, Severe acute respiratory syndrome-related coronavirus
  REGION 1..14: note = Table B: HLA-DRB3*02:01L HLA-DRB3*01:01L
  source 1..14: note = Severe acute respiratory syndrome coronavirus 2
TTFHLDGEVITFDN

SEQ ID NO: 20601 - protein, 13 aa, Severe acute respiratory syndrome-related coronavirus
  REGION 1..13: note = Table B: HLA-DRB3*02:01L HLA-DPA1*03:01-B1*04:02L HLA-DRB1*08:03L
  source 1..13: note = Severe acute respiratory syndrome coronavirus 2
VDNINLHTQVVDM

SEQ ID NO: 20602 - protein, 15 aa, Severe acute respiratory syndrome-related coronavirus
  REGION 1..15: note = Table B: HLA-DRB3*02:01L HLA-DPA1*01:03-B1*03:01L HLA-DRB1*11:01L HLA-DRB1*07:01L
  source 1..15: note = Severe acute respiratory syndrome coronavirus 2
GPTYLDGADVTKIKP

SEQ ID NO: 20603 - protein, 17 aa, Severe acute respiratory syndrome-related coronavirus
  REGION 1..17: note = Table B: HLA-DRB3*02:01L HLA-DPA1*01:03-B1*104:01L
  source 1..17: note = Severe acute respiratory syndrome coronavirus 2
DPSFLGRYMSALNHTKK

SEQ ID NO: 20604 - protein, 13 aa, Severe acute respiratory syndrome-related coronavirus
  REGION 1..13: note = Table B: HLA-DRB3*02:01L
  source 1..13: note = Severe acute respiratory syndrome coronavirus 2
VGELGDVRETMSY

SEQ ID NO: 20605 - protein, 12 aa, Severe acute respiratory syndrome-related coronavirus
  REGION 1..12: note = Table B: HLA-DRB3*02:01L
  source 1..12: note = Severe acute respiratory syndrome coronavirus 2
QTTLKGVEAVMY

SEQ ID NO: 20606 - protein, 16 aa, Severe acute respiratory syndrome-related coronavirus
  REGION 1..16: note = Table B: HLA-DRB3*02:01L HLA-DPA1*03:01-B1*04:02L HLA-DRB1*11:02L HLA-DRB4*01:01L HLA-DPA1*02:01-B1*13:01L HLA-DPA1*01:03-B1*104:01L
  source 1..16: note = Severe acute respiratory syndrome coronavirus 2
ETLYCIDGALLTKSSE

SEQ ID NO: 20607 - protein, 17 aa, Severe acute respiratory syndrome-related coronavirus
  REGION 1..17: note = Table B: HLA-DRB3*02:01L HLA-DPA1*01:03-B1*04:01L HLA-DPA1*01:03-B1*104:01L HLA-DRB1*08:03L
  source 1..17: note = Severe acute respiratory syndrome coronavirus 2
DNYYKKDNSYFTEQPID

SEQ ID NO: 20608 - protein, 12 aa, Severe acute respiratory syndrome-related coronavirus
  REGION 1..12: note = Table B: HLA-DRB3*02:01L
  source 1..12: note = Severe acute respiratory syndrome coronavirus 2
LVPNQPYPNASF

SEQ ID NO: 20609 - protein, 15 aa, Severe acute respiratory syndrome-related coronavirus
  REGION 1..15: note = Table B: HLA-DRB3*02:01L HLA-DRB1*14:02L HLA-DPA1*02:01-B1*13:01L
  source 1..15: note = Severe acute respiratory syndrome coronavirus 2
ADDLNQLTGYKKPAS

SEQ ID NO: 20610 - protein, 13 aa, Severe acute respiratory syndrome-related coronavirus
  REGION 1..13: note = Table B: HLA-DRB3*02:01L HLA-DQA1*05:05-B1*03:01L
  source 1..13: note = Severe acute respiratory syndrome coronavirus 2
VWHVNNATNKATY

SEQ ID NO: 20611 - protein, 11 aa, Severe acute respiratory syndrome-related coronavirus
  REGION 1..11: note = Table B: HLA-DRB3*02:01L HLA-DRB1*14:54L
  source 1..11: note = Severe acute respiratory syndrome coronavirus 2
DIILKPANNSL

SEQ ID NO: 20612 - protein, 13 aa, Severe acute respiratory syndrome-related coronavirus
  REGION 1..13: note = Table B: HLA-DRB3*02:01L HLA-DQA1*01-B1*05L HLA-DQA1*05:05-B1*03:19L HLA-DPA1*02:01-B1*13:01L HLA-DQA1*05:05-B1*03:01L HLA-DRB1*07:01L
  source 1..13: note = Severe acute respiratory syndrome coronavirus 2
VLGLKTLATHGLA

SEQ ID NO: 20613 - protein, 12 aa, Severe acute respiratory syndrome-related coronavirus
  REGION 1..12: note = Table B: HLA-DRB3*02:01L HLA-DPA1*01:03-B1*03:01L HLA-DRB1*11:03L HLA-DRB1*11:04L HLA-DRB5*01:01L HLA-DQA1*05:01-B1*02:01L HLA-DRB1*04:10L HLA-DRB1*12:02L HLA-DQA1*05:05-B1*03:01L HLA-DRB1*07:01L HLA-DRB1*10:01L
  REGION 1..12: note = CONT. FROM ABOVE: HLA-DRB1*04:08L
  source 1..12: note = Severe acute respiratory syndrome coronavirus 2
GYLNSTNVTIAT

SEQ ID NO: 20614 - protein, 12 aa, Severe acute respiratory syndrome-related coronavirus
  REGION 1..12: note = Table B: HLA-DRB3*02:01L HLA-DQA1*01-B1*05L HLA-DQA1*05:05-B1*03:01L
  source 1..12: note = Severe acute respiratory syndrome coronavirus 2
TIQITISSFKWD

SEQ ID NO: 20615 - protein, 13 aa, Severe acute respiratory syndrome-related coronavirus
  REGION 1..13: note = Table B: HLA-DRB3*02:01L HLA-DRB1*11:02L
  source 1..13: note = Severe acute respiratory syndrome coronavirus 2
YYVWKSYVHVVDG

SEQ ID NO: 20616 - protein, 13 aa, Severe acute respiratory syndrome-related coronavirus
  REGION 1..13: note = Table B: HLA-DRB3*02:01L HLA-DPA1*03:01-B1*04:02L HLA-DQA1*01:01-B1*05:01L HLA-DQA1*05:05-B1*03:19L HLA-DPA1*01:03-B1*04:02L HLA-DPA1*01:03-B1*104:01L HLA-DPA1*01:02-B1*04:01L HLA-DRB1*08:02L
  source 1..13: note = Severe acute respiratory syndrome coronavirus 2
LSHFVNLDNLRAN

SEQ ID NO: 20617 - protein, 12 aa, Severe acute respiratory syndrome-related coronavirus
  REGION 1..12: note = Table B: HLA-DRB3*02:01L
  source 1..12: note = Severe acute respiratory syndrome coronavirus 2
EESSAKSASVYY

SEQ ID NO: 20618 - protein, 13 aa, Severe acute respiratory syndrome-related coronavirus
  REGION 1..13: note = Table B: HLA-DRB3*02:01L HLA-DRB1*14:54L
  source 1..13: note = Severe acute respiratory syndrome coronavirus 2
EVAVKMFDAYVNT

SEQ ID NO: 20619 - protein, 13 aa, Severe acute respiratory syndrome-related coronavirus
  REGION 1..13: note = Table B: HLA-DRB3*02:01L
  source 1..13: note = Severe acute respiratory syndrome coronavirus 2
VAVKMFDAYVNTF

SEQ ID NO: 20620 - protein, 14 aa, Severe acute respiratory syndrome-related coronavirus
  REGION 1..14: note = Table B: HLA-DRB3*02:01L HLA-DPA1*01:03-B1*03:01L
  source 1..14: note = Severe acute respiratory syndrome coronavirus 2
TAEAELAKNVSLDN

SEQ ID NO: 20621 - protein, 13 aa, Severe acute respiratory syndrome-related coronavirus
  REGION 1..13: note = Table B: HLA-DRB3*02:01L HLA-DRB1*03:01L HLA-DRB1*14:01L HLA-DRB1*08:01L HLA-DPA1*01:03-B1*104:01L HLA-DRB1*08:03L
  source 1..13: note = Severe acute respiratory syndrome coronavirus 2
FVDSDVETKDVVE

SEQ ID NO: 20622 - protein, 14 aa, Severe acute respiratory syndrome-related coronavirus
  REGION 1..14: note = Table B: HLA-DRB3*02:01L HLA-DPA1*01:03-B1*03:01L HLA-DRB1*03:01L HLA-DRB1*11:03L HLA-DRB1*14:02L HLA-DQA1*05:05-B1*03:19L HLA-DPA1*01:03-B1*04:02L HLA-DPA1*02:01-B1*13:01L HLA-DPA1*01:03-B1*02:01L
  REGION 1..14: note = CONT. FROM ABOVE: HLA-DRB1*07:01L
  source 1..14: note = Severe acute respiratory syndrome coronavirus 2
YMLTYNKVENMTPR

SEQ ID NO: 20623 - protein, 16 aa, Severe acute respiratory syndrome-related coronavirus
  REGION 1..16: note = Table B: HLA-DRB3*02:01L HLA-DPA1*01:03-B1*03:01L
  source 1..16: note = Severe acute respiratory syndrome coronavirus 2
ITPVHVMSKHTDFSSE

SEQ ID NO: 20624 - protein, 18 aa, Severe acute respiratory syndrome-related coronavirus
  REGION 1..18: note = Table B: HLA-DRB3*02:01L HLA-DPA1*01:03-B1*04:01L HLA-DRB1*09:01L HLA-DPA1*01:03-B1*104:01L
  source 1..18: note = Severe acute respiratory syndrome coronavirus 2
TPVHVMSKHTDFSSEIIG

SEQ ID NO: 20625 - protein, 18 aa, Severe acute respiratory syndrome-related coronavirus
  REGION 1..18: note = Table B: HLA-DRB3*02:01L HLA-DPA1*03:01-B1*04:02L HLA-DRB1*14:02L HLA-DPA1*01:03-B1*04:02L
  source 1..18: note = Severe acute respiratory syndrome coronavirus 2
VTRDIASTDTCFANKHAD

SEQ ID NO: 20626 - protein, 16 aa, Severe acute respiratory syndrome-related coronavirus
  REGION 1..16: note = Table B: HLA-DRB3*02:01L HLA-DRB1*10:01L
  source 1..16: note = Severe acute respiratory syndrome coronavirus 2
NGDFLHFLPRVFSAVG

SEQ ID NO: 20627 - protein, 14 aa, Severe acute respiratory syndrome-related coronavirus
  REGION 1..14: note = Table B: HLA-DRB3*02:01L HLA-DRB1*11:03L HLA-DRB1*11:01L HLA-DRB1*07:01L HLA-DRB1*10:01L
  source 1..14: note = Severe acute respiratory syndrome coronavirus 2
EGSVAYESLRPDTR

SEQ ID NO: 20628 - protein, 15 aa, Severe acute respiratory syndrome-related coronavirus
  REGION 1..15: note = Table B: HLA-DRB3*02:01L HLA-DRB1*07:01L
  source 1..15: note = Severe acute respiratory syndrome coronavirus 2
VRVVTTFDSEYCRHG

SEQ ID NO: 20629 - protein, 12 aa, Severe acute respiratory syndrome-related coronavirus
  REGION 1..12: note = Table B: HLA-DRB3*02:01L
  source 1..12: note = Severe acute respiratory syndrome coronavirus 2
YSFLPGVYSVIY

SEQ ID NO: 20630 - protein, 14 aa, Severe acute respiratory syndrome-related coronavirus
  REGION 1..14: note = Table B: HLA-DRB3*02:01L HLA-DRB3*01:01L
  source 1..14: note = Severe acute respiratory syndrome coronavirus 2
STKHFYWFFSNYLK

SEQ ID NO: 20631 - protein, 16 aa, Severe acute respiratory syndrome-related coronavirus
  REGION 1..16: note = Table B: HLA-DRB3*02:01L HLA-DPA1*01:03-B1*03:01L HLA-DRB1*11:02L HLA-DRB1*14:02L HLA-DQA1*05:05-B1*03:01L
  source 1..16: note = Severe acute respiratory syndrome coronavirus 2
KHFYWFFSNYLKRRVV

SEQ ID NO: 20632 - protein, 12 aa, Severe acute respiratory syndrome-related coronavirus
  REGION 1..12: note = Table B: HLA-DRB3*02:01L HLA-DRB1*14:01L HLA-DPA1*01:03-B1*104:01L HLA-DQA1*05:05-B1*03:01L HLA-DRB1*04:08L
  source 1..12: note = Severe acute respiratory syndrome coronavirus 2
RVVFNGVSFSTF

SEQ ID NO: 20633 - protein, 12 aa, Severe acute respiratory syndrome-related coronavirus
  REGION 1..12: note = Table B: HLA-DRB3*02:01L HLA-DQA1*03:01-B1*03:02L HLA-DQA1*05:05-B1*03:01L HLA-DRB1*04:08L
  source 1..12: note = Severe acute respiratory syndrome coronavirus 2
VVFNGVSFSTFE

SEQ ID NO: 20634 - protein, 16 aa, Severe acute respiratory syndrome-related coronavirus
  REGION 1..16: note = Table B: HLA-DRB3*02:01L HLA-DRB1*11:04L HLA-DRB1*11:01L
  source 1..16: note = Severe acute respiratory syndrome coronavirus 2
YLKLRSDVLLPLTQYN

SEQ ID NO: 20635 - protein, 13 aa, Severe acute respiratory syndrome-related coronavirus
  REGION 1..13: note = Table B: HLA-DRB3*02:01L
  source 1..13: note = Severe acute respiratory syndrome coronavirus 2
YKYFSGAMDTTSY

SEQ ID NO: 20636 - protein, 12 aa, Severe acute respiratory syndrome-related coronavirus
  REGION 1..12: note = Table B: HLA-DRB3*02:01L
  source 1..12: note = Severe acute respiratory syndrome coronavirus 2
VRIQPGQTFSVL

SEQ ID NO: 20637 - protein, 15 aa, Severe acute respiratory syndrome-related coronavirus
  REGION 1..15: note = Table B: HLA-DRB3*02:01L HLA-DRB1*12:02L
  source 1..15: note = Severe acute respiratory syndrome coronavirus 2
LPTGVHAGTDLEGNF

SEQ ID NO: 20638 - protein, 16 aa, Severe acute respiratory syndrome-related coronavirus
  REGION 1..16: note = Table B: HLA-DRB3*02:01L HLA-DRB1*14:02L HLA-DPA1*01:03-B1*104:01L
  source 1..16: note = Severe acute respiratory syndrome coronavirus 2
GTDLEGNFYGPFVDRQ

SEQ ID NO: 20639 - protein, 13 aa, Severe acute respiratory syndrome-related coronavirus
  REGION 1..13: note = Table B: HLA-DRB3*02:01L
  source 1..13: note = Severe acute respiratory syndrome coronavirus 2
AWLYAAVINGDRW

SEQ ID NO: 20640 - protein, 13 aa, Severe acute respiratory syndrome-related coronavirus
  REGION 1..13: note = Table B: HLA-DRB3*02:01L HLA-DPA1*01:03-B1*04:01L HLA-DPA1*01:03-B1*04:02L
  source 1..13: note = Severe acute respiratory syndrome coronavirus 2
FLNRFTTTLNDFN

SEQ ID NO: 20641 - protein, 16 aa, Severe acute respiratory syndrome-related coronavirus
  REGION 1..16: note = Table B: HLA-DRB3*02:01L HLA-DRB1*08:02L
  source 1..16: note = Severe acute respiratory syndrome coronavirus 2
LNDFNLVAMKYNYEPL

SEQ ID NO: 20642 - protein, 14 aa, Severe acute respiratory syndrome-related coronavirus
  REGION 1..14: note = Table B: HLA-DRB3*02:01L HLA-DRB1*11:03L HLA-DRB1*14:02L HLA-DQA1*01:01-B1*05:01L HLA-DQA1*05:05-B1*03:19L HLA-DRB1*12:02L HLA-DPA1*01:03-B1*104:01L HLA-DQA1*05:05-B1*03:01L HLA-DRB1*07:01L HLA-DRB1*10:01L
  source 1..14: note = Severe acute respiratory syndrome coronavirus 2
VAMKYNYEPLTQDH

SEQ ID NO: 20643 - protein, 17 aa, Severe acute respiratory syndrome-related coronavirus
  REGION 1..17: note = Table B: HLA-DRB3*02:01L
  source 1..17: note = Severe acute respiratory syndrome coronavirus 2
NGRTILGSALLEDEFTP

SEQ ID NO: 20644 - protein, 14 aa, Severe acute respiratory syndrome-related coronavirus
  REGION 1..14: note = Table B: HLA-DRB3*02:01L HLA-DRB1*03:01L HLA-DRB1*11:02L HLA-DPA1*01:03-B1*02:01L
  source 1..14: note = Severe acute respiratory syndrome coronavirus 2
LGVYDYLVSTQEFR

SEQ ID NO: 20645 - protein, 13 aa, Severe acute respiratory syndrome-related coronavirus
  REGION 1..13: note = Table B: HLA-DRB3*02:01L
  source 1..13: note = Severe acute respiratory syndrome coronavirus 2
NDILLAKDTTEAF

SEQ ID NO: 20646 - protein, 13 aa, Severe acute respiratory syndrome-related coronavirus
  REGION 1..13: note = Table B: HLA-DRB3*02:01L HLA-DPA1*03:01-B1*04:02L HLA-DRB1*14:01L HLA-DRB1*11:03L HLA-DRB1*08:01L HLA-DPA1*01:03-B1*04:02L HLA-DRB1*12:02L HLA-DPA1*01:02-B1*04:01L HLA-DRB1*07:01L HLA-DRB1*10:01L
  REGION 1..13: note = CONT. FROM ABOVE: HLA-DRB1*15:03L
  source 1..13: note = Severe acute respiratory syndrome coronavirus 2
LDNRATLQAIASE

SEQ ID NO: 20647 - protein, 14 aa, Severe acute respiratory syndrome-related coronavirus
  REGION 1..14: note = Table B: HLA-DRB3*02:01L
  source 1..14: note = Severe acute respiratory syndrome coronavirus 2
IASEFSSLPSYAAF

SEQ ID NO: 20648 - protein, 14 aa, Severe acute respiratory syndrome-related coronavirus
  REGION 1..14: note = Table B: HLA-DRB3*02:01L HLA-DRB1*08:01L HLA-DPA1*01:03-B1*04:02L HLA-DRB1*12:02L HLA-DRB3*01:01L HLA-DRB1*07:01L HLA-DRB1*08:02L
  source 1..14: note = Severe acute respiratory syndrome coronavirus 2
ASEFSSLPSYAAFA

SEQ ID NO: 20649 - protein, 15 aa, Severe acute respiratory syndrome-related coronavirus
  REGION 1..15: note = Table B: HLA-DRB3*02:01L HLA-DRB1*08:01L HLA-DPA1*01:03-B1*04:02L HLA-DPA1*02:01-B1*13:01L HLA-DRB1*08:02L
  source 1..15: note = Severe acute respiratory syndrome coronavirus 2
NNIINNARDGCVPLN

SEQ ID NO: 20650 - protein, 17 aa, Severe acute respiratory syndrome-related coronavirus
  REGION 1..17: note = Table B: HLA-DRB3*02:01L
  source 1..17: note = Severe acute respiratory syndrome coronavirus 2
SPVALRQMSCAAGTTQT

SEQ ID NO: 20651 - protein, 14 aa, Severe acute respiratory syndrome-related coronavirus
  REGION 1..14: note = Table B: HLA-DRB3*02:01L
  source 1..14: note = Severe acute respiratory syndrome coronavirus 2
DDNALAYYNTTKGG

SEQ ID NO: 20652 - protein, 19 aa, Severe acute respiratory syndrome-related coronavirus
  REGION 1..19: note = Table B: HLA-DRB3*02:01L HLA-DRB1*14:54L
  source 1..19: note = Severe acute respiratory syndrome coronavirus 2
DTPKGPKVKYLYFIKGLNN

SEQ ID NO: 20653 - protein, 14 aa, Severe acute respiratory syndrome-related coronavirus
  REGION 1..14: note = Table B: HLA-DRB3*02:01L HLA-DPA1*03:01-B1*04:02L HLA-DPA1*01:03-B1*02:01L HLA-DPA1*01:03-B1*104:01L
  source 1..14: note = Severe acute respiratory syndrome coronavirus 2
GSLAATVRLQAGNA

SEQ ID NO: 20654 - protein, 16 aa, Severe acute respiratory syndrome-related coronavirus
  REGION 1..16: note = Table B: HLA-DRB3*02:01L HLA-DRB1*15:01L
  source 1..16: note = Severe acute respiratory syndrome coronavirus 2
NSTVLSFCAFAVDAAK

SEQ ID NO: 20655 - protein, 14 aa, Severe acute respiratory syndrome-related coronavirus
  REGION 1..14: note = Table B: HLA-DRB3*02:01L HLA-DRB1*08:01L
  source 1..14: note = Severe acute respiratory syndrome coronavirus 2
VDAAKAYKDYLASG

SEQ ID NO: 20656 - protein, 16 aa, Severe acute respiratory syndrome-related coronavirus
  REGION 1..16: note = Table B: HLA-DRB3*02:01L HLA-DPA1*03:01-B1*04:02L HLA-DRB1*03:01L HLA-DRB1*11:02L HLA-DRB1*14:02L HLA-DPA1*01:03-B1*04:01L HLA-DRB1*09:01L HLA-DPA1*01:02-B1*04:01L HLA-DRB1*07:01L HLA-DRB1*08:02L
  source 1..16: note = Severe acute respiratory syndrome coronavirus 2
GKYVQIPTTCANDPVG

SEQ ID NO: 20657 - protein, 13 aa, Severe acute respiratory syndrome-related coronavirus
  REGION 1..13: note = Table B: HLA-DRB3*02:01L HLA-DRB1*11:03L
  source 1..13: note = Severe acute respiratory syndrome coronavirus 2
ILRVYANLGERVR

SEQ ID NO: 20658 - protein, 18 aa, Severe acute respiratory syndrome-related coronavirus
  REGION 1..18: note = Table B: HLA-DRB3*02:01L
  source 1..18: note = Severe acute respiratory syndrome coronavirus 2
TEERLKLFDRYFKYWDQT

SEQ ID NO: 20659 - protein, 16 aa, Severe acute respiratory syndrome-related coronavirus
  REGION 1..16: note = Table B: HLA-DRB3*02:01L HLA-DRB4*01:01L HLA-DQA1*05:05-B1*03:116L HLA-DPA1*01:03-B1*104:01L HLA-DQA1*05:05-B1*03:01L HLA-DRB1*08:02L
  source 1..16: note = Severe acute respiratory syndrome coronavirus 2
SGNLLLDKRTTCFSVA

SEQ ID NO: 20660 - protein, 14 aa, Severe acute respiratory syndrome-related coronavirus
  REGION 1..14: note = Table B: HLA-DRB3*02:01L HLA-DPA1*01:03-B1*03:01L
  source 1..14: note = Severe acute respiratory syndrome coronavirus 2
VAALTNNVAFQTVK

SEQ ID NO: 20661 - protein, 11 aa, Severe acute respiratory syndrome-related coronavirus
  REGION 1..11: note = Table B: HLA-DRB3*02:01L HLA-DPA1*01:03-B1*104:01L HLA-DRB1*07:01L
  source 1..11: note = Severe acute respiratory syndrome coronavirus 2
VAFQTVKPGNF

SEQ ID NO: 20662 - protein, 12 aa, Severe acute respiratory syndrome-related coronavirus
  REGION 1..12: note = Table B: HLA-DRB3*02:01L HLA-DRB1*09:01L
  source 1..12: note = Severe acute respiratory syndrome coronavirus 2
DFYDFAVSKGFF

SEQ ID NO: 20663 - protein, 14 aa, Severe acute respiratory syndrome-related coronavirus
  REGION 1..14: note = Table B: HLA-DRB3*02:01L HLA-DRB3*01:01L
  source 1..14: note = Severe acute respiratory syndrome coronavirus 2
FYDFAVSKGFFKEG

SEQ ID NO: 20664 - protein, 15 aa, Severe acute respiratory syndrome-related coronavirus
  REGION 1..15: note = Table B: HLA-DRB3*02:01L HLA-DRB1*08:01L
  source 1..15: note = Severe acute respiratory syndrome coronavirus 2
DGNAAISDYDYYRYN

SEQ ID NO: 20665 - protein, 16 aa, Severe acute respiratory syndrome-related coronavirus
  REGION 1..16: note = Table B: HLA-DRB3*02:01L HLA-DPA1*03:01-B1*04:02L HLA-DRB1*03:01L HLA-DRB1*11:03L HLA-DQA1*05:01-B1*02:01L HLA-DRB1*13:01L HLA-DPA1*01:03-B1*02:01L HLA-DPA1*01:03-B1*104:01L HLA-DRB1*07:01L
  source 1..16: note = Severe acute respiratory syndrome coronavirus 2
GFPFNKWGKARLYYDS

SEQ ID NO: 20666 - protein, 18 aa, Severe acute respiratory syndrome-related coronavirus
  REGION 1..18: note = Table B: HLA-DRB3*02:01L HLA-DPA1*01:03-B1*03:01L HLA-DPA1*03:01-B1*04:02L HLA-DRB1*11:02L HLA-DQA1*05:05-B1*03:19L HLA-DPA1*01:03-B1*04:02L HLA-DPA1*01:03-B1*104:01L
  source 1..18: note = Severe acute respiratory syndrome coronavirus 2
MPNMLRIMASLVLARKHT

SEQ ID NO: 20667 - protein, 12 aa, Severe acute respiratory syndrome-related coronavirus
  REGION 1..12: note = Table B: HLA-DRB3*02:01L HLA-DRB1*11:04L
  source 1..12: note = Severe acute respiratory syndrome coronavirus 2
DKYVRNLQHRLY

SEQ ID NO: 20668 - protein, 18 aa, Severe acute respiratory syndrome-related coronavirus
  REGION 1..18: note = Table B: HLA-DRB3*02:01L
  source 1..18: note = Severe acute respiratory syndrome coronavirus 2
DVDTDFVNEFYAYLRKHF

SEQ ID NO: 20669 - protein, 18 aa, Severe acute respiratory syndrome-related coronavirus
  REGION 1..18: note = Table B: HLA-DRB3*02:01L HLA-DQA1*01-B1*05L HLA-DRB4*01:01L HLA-DQA1*05:05-B1*03:116L HLA-DRB1*09:01L HLA-DRB1*15:01L
  source 1..18: note = Severe acute respiratory syndrome coronavirus 2
GPHEFCSQHTMLVKQGDD

SEQ ID NO: 20670 - protein, 12 aa, Severe acute respiratory syndrome-related coronavirus
  REGION 1..12: note = Table B: HLA-DRB3*02:01L HLA-DRB1*15:01L
  source 1..12: note = Severe acute respiratory syndrome coronavirus 2
VYLPYPDPSRIL

SEQ ID NO: 20671 - protein, 17 aa, Severe acute respiratory syndrome-related coronavirus
  REGION 1..17: note = Table B: HLA-DRB3*02:01L
  source 1..17: note = Severe acute respiratory syndrome coronavirus 2
DAYPLTKHPNQEYADVF

SEQ ID NO: 20672 - protein, 14 aa, Severe acute respiratory syndrome-related coronavirus
  REGION 1..14: note = Table B: HLA-DRB3*02:01L HLA-DRB1*13:01L HLA-DPA1*01:03-B1*02:01L HLA-DRB1*08:03L
  source 1..14: note = Severe acute respiratory syndrome coronavirus 2
MLTNDNTSRYWEPE

SEQ ID NO: 20673 - protein, 15 aa, Severe acute respiratory syndrome-related coronavirus
  REGION 1..15: note = Table B: HLA-DRB3*02:01L
  source 1..15: note = Severe acute respiratory syndrome coronavirus 2
DNTSRYWEPEFYEAM

SEQ ID NO: 20674 - protein, 13 aa, Severe acute respiratory syndrome-related coronavirus
  REGION 1..13: note = Table B: HLA-DRB3*02:01L HLA-DRB1*14:02L HLA-DPA1*01:03-B1*04:02L
  source 1..13: note = Severe acute respiratory syndrome coronavirus 2
GDYILANTCTERL

SEQ ID NO: 20675 - protein, 15 aa, Severe acute respiratory syndrome-related coronavirus
  REGION 1..15: note = Table B: HLA-DRB3*02:01L HLA-DPA1*01:03-B1*04:02L
  source 1..15: note = Severe acute respiratory syndrome coronavirus 2
YRVTKNSKVQIGEYT

SEQ ID NO: 20676 - protein, 12 aa, Severe acute respiratory syndrome-related coronavirus
  REGION 1..12: note = Table B: HLA-DRB3*02:01L HLA-DRB1*11:03L HLA-DRB3*01:01L
  source 1..12: note = Severe acute respiratory syndrome coronavirus 2
DKFKVNSTLEQY

SEQ ID NO: 20677 - protein, 14 aa, Severe acute respiratory syndrome-related coronavirus
  REGION 1..14: note = Table B: HLA-DRB3*02:01L HLA-DPA1*01:03-B1*03:01L HLA-DRB1*14:02L HLA-DRB1*08:01L HLA-DPA1*02:01-B1*13:01L
  source 1..14: note = Severe acute respiratory syndrome coronavirus 2
EQYVFCTVNALPET

SEQ ID NO: 20678 - protein, 18 aa, Severe acute respiratory syndrome-related coronavirus
  REGION 1..18: note = Table B: HLA-DRB3*02:01L
  source 1..18: note = Severe acute respiratory syndrome coronavirus 2
LPAPRTLLTKGTLEPEYF

SEQ ID NO: 20679 - protein, 14 aa, Severe acute respiratory syndrome-related coronavirus
  REGION 1..14: note = Table B: HLA-DRB3*02:01L HLA-DRB5*01:01L HLA-DPA1*01:03-B1*04:02L HLA-DRB1*12:02L HLA-DRB1*08:02L HLA-DRB1*15:01L
  source 1..14: note = Severe acute respiratory syndrome coronavirus 2
SALVYDNKLKAHKD

SEQ ID NO: 20680 - protein, 13 aa, Severe acute respiratory syndrome-related coronavirus
  REGION 1..13: note = Table B: HLA-DRB3*02:01L HLA-DPA1*03:01-B1*04:02L HLA-DRB1*11:03L HLA-DRB1*14:02L HLA-DRB1*09:01L
  source 1..13: note = Severe acute respiratory syndrome coronavirus 2
GVNLVAVPTGYVD

SEQ ID NO: 20681 - protein, 15 aa, Severe acute respiratory syndrome-related coronavirus
  REGION 1..15: note = Table B: HLA-DRB3*02:01L HLA-DPA1*03:01-B1*04:02L HLA-DRB1*11:03L HLA-DRB1*14:02L HLA-DRB1*08:01L HLA-DPA1*01:03-B1*104:01L
  source 1..15: note = Severe acute respiratory syndrome coronavirus 2
VNLVAVPTGYVDTPN

SEQ ID NO: 20682 - protein, 14 aa, Severe acute respiratory syndrome-related coronavirus
  REGION 1..14: note = Table B: HLA-DRB3*02:01L HLA-DPA1*03:01-B1*04:02L HLA-DRB1*14:01L HLA-DPA1*01:03-B1*104:01L
  source 1..14: note = Severe acute respiratory syndrome coronavirus 2
DVQQWGFTGNLQSN

SEQ ID NO: 20683 - protein, 15 aa, Severe acute respiratory syndrome-related coronavirus
  REGION 1..15: note = Table B: HLA-DRB3*02:01L HLA-DRB1*03:01L HLA-DRB1*11:02L HLA-DRB4*01:01L HLA-DPA1*01:03-B1*04:01L HLA-DQA1*05:05-B1*03:116L HLA-DRB1*09:01L HLA-DRB1*08:02L
  source 1..15: note = Severe acute respiratory syndrome coronavirus 2
VQQWGFTGNLQSNHD

SEQ ID NO: 20684 - protein, 18 aa, Severe acute respiratory syndrome-related coronavirus
  REGION 1..18: note = Table B: HLA-DRB3*02:01L HLA-DRB1*11:02L HLA-DRB1*11:03L HLA-DRB1*09:01L HLA-DRB1*10:01L HLA-DRB1*08:02L HLA-DRB1*08:03L
  source 1..18: note = Severe acute respiratory syndrome coronavirus 2
VNKHAFHTPAFDKSAFVN

SEQ ID NO: 20685 - protein, 12 aa, Severe acute respiratory syndrome-related coronavirus
  REGION 1..12: note = Table B: HLA-DRB3*02:01L HLA-DRB1*11:03L HLA-DRB1*12:02L HLA-DRB1*14:54L
  source 1..12: note = Severe acute respiratory syndrome coronavirus 2
EVPVSIINNTVY

SEQ ID NO: 20686 - protein, 13 aa, Severe acute respiratory syndrome-related coronavirus
  REGION 1..13: note = Table B: HLA-DRB3*02:01L HLA-DPA1*01:03-B1*03:01L HLA-DQA1*05:05-B1*03:01L HLA-DRB1*07:01L
  source 1..13: note = Severe acute respiratory syndrome coronavirus 2
NIKPVPEVKILNN

SEQ ID NO: 20687 - protein, 17 aa, Severe acute respiratory syndrome-related coronavirus
  REGION 1..17: note = Table B: HLA-DRB3*02:01L HLA-DRB1*14:02L
  source 1..17: note = Severe acute respiratory syndrome coronavirus 2
APAHISTIGVCSMTDIA

SEQ ID NO: 20688 - protein, 14 aa, Severe acute respiratory syndrome-related coronavirus
  REGION 1..14: note = Table B: HLA-DRB3*02:01L HLA-DRB1*03:01L HLA-DRB1*11:02L HLA-DRB1*08:01L HLA-DRB5*01:01L HLA-DRB4*01:01L HLA-DPA1*01:03-B1*04:02L HLA-DRB3*01:01L HLA-DPA1*02:01-B1*13:01L HLA-DPA1*01:03-B1*104:01L
  REGION 1..14: note = CONT. FROM ABOVE: HLA-DRB1*07:01L HLA-DRB1*08:02L
  source 1..14: note = Severe acute respiratory syndrome coronavirus 2
GVLITEGSVKGLQP

SEQ ID NO: 20689 - protein, 11 aa, Severe acute respiratory syndrome-related coronavirus
  REGION 1..11: note = Table B: HLA-DRB3*02:01L HLA-DRB1*12:02L HLA-DRB1*07:01L
  source 1..11: note = Severe acute respiratory syndrome coronavirus 2
GVVQQLPETYF

SEQ ID NO: 20690 - protein, 11 aa, Severe acute respiratory syndrome-related coronavirus
  REGION 1..11: note = Table B: HLA-DRB3*02:01L HLA-DRB1*14:17L
  source 1..11: note = Severe acute respiratory syndrome coronavirus 2
VVQQLPETYFT

SEQ ID NO: 20691 - protein, 15 aa, Severe acute respiratory syndrome-related coronavirus
  REGION 1..15: note = Table B: HLA-DRB3*02:01L HLA-DPA1*01:03-B1*04:01L HLA-DPA1*01:03-B1*02:01L HLA-DQA1*05:05-B1*03:01L
  source 1..15: note = Severe acute respiratory syndrome coronavirus 2
DEFIERYKLEGYAFE

SEQ ID NO: 20692 - protein, 12 aa, Severe acute respiratory syndrome-related coronavirus
  REGION 1..12: note = Table B: HLA-DRB3*02:01L
  source 1..12: note = Severe acute respiratory syndrome coronavirus 2
DFIPMDSTVKNY

SEQ ID NO: 20693 - protein, 16 aa, Severe acute respiratory syndrome-related coronavirus
  REGION 1..16: note = Table B: HLA-DRB3*02:01L HLA-DRB1*04:08L
  source 1..16: note = Severe acute respiratory syndrome coronavirus 2
IPMDSTVKNYFITDAQ

SEQ ID NO: 20694 - protein, 13 aa, Severe acute respiratory syndrome-related coronavirus
  REGION 1..13: note = Table B: HLA-DRB3*02:01L HLA-DRB3*01:01L
  source 1..13: note = Severe acute respiratory syndrome coronavirus 2
VVKVTIDYTEISF

SEQ ID NO: 20695 - protein, 18 aa, Severe acute respiratory syndrome-related coronavirus
  REGION 1..18: note = Table B: HLA-DRB3*02:01L HLA-DQA1*05:05-B1*03:116L
  source 1..18: note = Severe acute respiratory syndrome coronavirus 2
SSEAFLIGCNYLGKPREQ

SEQ ID NO: 20696 - protein, 12 aa, Severe acute respiratory syndrome-related coronavirus
  REGION 1..12: note = Table B: HLA-DRB3*02:01L HLA-DRB1*04:08L
  source 1..12: note = Severe acute respiratory syndrome coronavirus 2
WRNTNPIQLSSY

SEQ ID NO: 20697 - protein, 14 aa, Severe acute respiratory syndrome-related coronavirus
  REGION 1..14: note = Table B: HLA-DRB3*02:01L HLA-DPA1*01:03-B1*03:01L HLA-DRB1*14:02L HLA-DPA1*01:03-B1*04:01L HLA-DRB1*07:01L
  source 1..14: note = Severe acute respiratory syndrome coronavirus 2
SSYSLFDMSKFPLK

SEQ ID NO: 20698 - protein, 12 aa, Severe acute respiratory syndrome-related coronavirus
  REGION 1..12: note = Table B: HLA-DRB3*02:01L HLA-DRB1*14:17L HLA-DRB1*04:08L
  source 1..12: note = Severe acute respiratory syndrome coronavirus 2
NPVLPFNDGVYF

SEQ ID NO: 20699 - protein, 19 aa, Severe acute respiratory syndrome-related coronavirus
  REGION 1..19: note = Table B: HLA-DRB3*02:01L
  source 1..19: note = Severe acute respiratory syndrome coronavirus 2
DPFLGVYYHKNNKSWMESE

SEQ ID NO: 20700 - protein, 16 aa, Severe acute respiratory syndrome-related coronavirus
  REGION 1..16: note = Table B: HLA-DRB3*02:01L HLA-DQA1*05:05-B1*03:116L HLA-DRB1*08:02L
  source 1..16: note = Severe acute respiratory syndrome coronavirus 2
FEYVSQPFLMDLEGKQ

SEQ ID NO: 20701 - protein, 16 aa, Severe acute respiratory syndrome-related coronavirus
  REGION 1..16: note = Table B: HLA-DRB3*02:01L HLA-DRB1*14:02L HLA-DQA1*05:01-B1*02:01L
  source 1..16: note = Severe acute respiratory syndrome coronavirus 2
QGNFKNLREFVFKNID

SEQ ID NO: 20702 - protein, 17 aa, Severe acute respiratory syndrome-related coronavirus
  REGION 1..17: note = Table B: HLA-DRB3*02:01L HLA-DRB1*03:01L HLA-DRB1*13:01L HLA-DPA1*01:03-B1*04:01L HLA-DRB1*07:01L HLA-DRB1*10:01L
  source 1..17: note = Severe acute respiratory syndrome coronavirus 2
FQTLLALHRSYLTPGDS

SEQ ID NO: 20703 - protein, 13 aa, Severe acute respiratory syndrome-related coronavirus
  REGION 1..13: note = Table B: HLA-DRB3*02:01L
  source 1..13: note = Severe acute respiratory syndrome coronavirus 2
FNATRFASVYAWN

SEQ ID NO: 20704 - protein, 16 aa, Severe acute respiratory syndrome-related coronavirus
  REGION 1..16: note = Table B: HLA-DRB3*02:01L HLA-DPA1*03:01-B1*04:02L HLA-DRB1*11:02L HLA-DRB1*14:02L HLA-DPA1*01:03-B1*04:02L
  source 1..16: note = Severe acute respiratory syndrome coronavirus 2
ATRFASVYAWNRKRIS

SEQ ID NO: 20705 - protein, 14 aa, Severe acute respiratory syndrome-related coronavirus
  REGION 1..14: note = Table B: HLA-DRB3*02:01L HLA-DRB1*11:02L HLA-DRB1*14:02L HLA-DQA1*01:01-B1*05:01L HLA-DRB1*08:01L HLA-DRB1*11:01L HLA-DRB1*09:01L HLA-DRB3*01:01L HLA-DPA1*01:03-B1*02:01L HLA-DRB1*07:01L HLA-DRB1*08:02L
  source 1..14: note = Severe acute respiratory syndrome coronavirus 2
VADYSVLYNSASFS

SEQ ID NO: 20706 - protein, 12 aa, Severe acute respiratory syndrome-related coronavirus
  REGION 1..12: note = Table B: HLA-DRB3*02:01L
  source 1..12: note = Severe acute respiratory syndrome coronavirus 2
SVLYNSASFSTF

SEQ ID NO: 20707 - protein, 15 aa, Severe acute respiratory syndrome-related coronavirus
  REGION 1..15: note = Table B: HLA-DRB3*02:01L
  source 1..15: note = Severe acute respiratory syndrome coronavirus 2
IAWNSNNLDSKVGGN

SEQ ID NO: 20708 - protein, 12 aa, Severe acute respiratory syndrome-related coronavirus
  REGION 1..12: note = Table B: HLA-DRB3*02:01L
  source 1..12: note = Severe acute respiratory syndrome coronavirus 2
SNNLDSKVGGNY

SEQ ID NO: 20709 - protein, 13 aa, Severe acute respiratory syndrome-related coronavirus
  REGION 1..13: note = Table B: HLA-DRB3*02:01L
  source 1..13: note = Severe acute respiratory syndrome coronavirus 2
GFQPTNGVGYQPY

SEQ ID NO: 20710 - protein, 16 aa, Severe acute respiratory syndrome-related coronavirus
  REGION 1..16: note = Table B: HLA-DRB3*02:01L HLA-DPA1*01:03-B1*03:01L HLA-DRB1*11:02L HLA-DRB1*11:01L HLA-DQA1*05:01-B1*02:01L HLA-DQA1*05:05-B1*03:01L
  source 1..16: note = Severe acute respiratory syndrome coronavirus 2
NKKFLPFQQFGRDIAD

SEQ ID NO: 20711 - protein, 15 aa, Severe acute respiratory syndrome-related coronavirus
  REGION 1..15: note = Table B: HLA-DRB3*02:01L HLA-DPA1*01:03-B1*03:01L HLA-DQA1*01:01-B1*05:01L HLA-DPA1*01:03-B1*104:01L
  source 1..15: note = Severe acute respiratory syndrome coronavirus 2
LPFQQFGRDIADTTD

SEQ ID NO: 20712 - protein, 15 aa, Severe acute respiratory syndrome-related coronavirus
  REGION 1..15: note = Table B: HLA-DRB3*02:01L HLA-DRB1*11:01L
  source 1..15: note = Severe acute respiratory syndrome coronavirus 2
IIAYTMSLGAENSVA

SEQ ID NO: 20713 - protein, 13 aa, Severe acute respiratory syndrome-related coronavirus
  REGION 1..13: note = Table B: HLA-DRB3*02:01L
  source 1..13: note = Severe acute respiratory syndrome coronavirus 2
EILPVSMTKTSVD

SEQ ID NO: 20714 - protein, 14 aa, Severe acute respiratory syndrome-related coronavirus
  REGION 1..14: note = Table B: HLA-DRB3*02:01L
  source 1..14: note = Severe acute respiratory syndrome coronavirus 2
LNRALTGIAVEQDK

SEQ ID NO: 20715 - protein, 13 aa, Severe acute respiratory syndrome-related coronavirus
  REGION 1..13: note = Table B: HLA-DRB3*02:01L HLA-DRB3*01:01L HLA-DPA1*01:03-B1*104:01L
  source 1..13: note = Severe acute respiratory syndrome coronavirus 2
RALTGIAVEQDKN

SEQ ID NO: 20716 - protein, 12 aa, Severe acute respiratory syndrome-related coronavirus
  REGION 1..12: note = Table B: HLA-DRB3*02:01L HLA-DQA1*05:05-B1*03:01L
  source 1..12: note = Severe acute respiratory syndrome coronavirus 2
AVEQDKNTQEVF

SEQ ID NO: 20717 - protein, 20 aa, Severe acute respiratory syndrome-related coronavirus
  REGION 1..20: note = Table B: HLA-DRB3*02:01L
  source 1..20: note = Severe acute respiratory syndrome coronavirus 2
PDPSKPSKRSFIEDLLFNKV

SEQ ID NO: 20718 - protein, 14 aa, Severe acute respiratory syndrome-related coronavirus
  REGION 1..14: note = Table B: HLA-DRB3*02:01L HLA-DRB1*11:02L HLA-DRB1*08:03L
  source 1..14: note = Severe acute respiratory syndrome coronavirus 2
VLYENQKLIANQFN

SEQ ID NO: 20719 - protein, 12 aa, Severe acute respiratory syndrome-related coronavirus
  REGION 1..12: note = Table B: HLA-DRB3*02:01L HLA-DRB1*04:10L HLA-DRB1*07:01L HLA-DRB1*10:01L HLA-DRB1*04:08L
  source 1..12: note = Severe acute respiratory syndrome coronavirus 2
DVVNQNAQALNT

SEQ ID NO: 20720 - protein, 14 aa, Severe acute respiratory syndrome-related coronavirus
  REGION 1..14: note = Table B: HLA-DRB3*02:01L HLA-DPA1*03:01-B1*04:02L HLA-DRB1*14:02L HLA-DPA1*02:01-B1*13:01L
  source 1..14: note = Severe acute respiratory syndrome coronavirus 2
VKQLSSNFGAISSV

SEQ ID NO: 20721 - protein, 13 aa, Severe acute respiratory syndrome-related coronavirus
  REGION 1..13: note = Table B: HLA-DRB3*02:01L HLA-DPA1*03:01-B1*04:02L HLA-DRB1*03:01L HLA-DRB1*11:02L HLA-DRB1*13:01L HLA-DRB4*01:01L HLA-DPA1*01:03-B1*04:02L HLA-DPA1*02:01-B1*13:01L HLA-DPA1*01:03-B1*02:01L HLA-DRB1*08:02L HLA-DRB1*15:01L
  source 1..13: note = Severe acute respiratory syndrome coronavirus 2
AEIRASANLAATK

SEQ ID NO: 20722 - protein, 13 aa, Severe acute respiratory syndrome-related coronavirus
  REGION 1..13: note = Table B: HLA-DRB3*02:01L HLA-DPA1*02:01-B1*13:01L
  source 1..13: note = Severe acute respiratory syndrome coronavirus 2
EIRASANLAATKM

SEQ ID NO: 20723 - protein, 15 aa, Severe acute respiratory syndrome-related coronavirus
  REGION 1..15: note = Table B: HLA-DRB3*02:01L HLA-DRB1*14:02L HLA-DRB1*11:01L HLA-DRB3*01:01L HLA-DRB1*10:01L HLA-DRB1*08:03L
  source 1..15: note = Severe acute respiratory syndrome coronavirus 2
VVFLHVTYVPAQEKN

SEQ ID NO: 20724 - protein, 12 aa, Severe acute respiratory syndrome-related coronavirus
  REGION 1..12: note = Table B: HLA-DRB3*02:01L
  source 1..12: note = Severe acute respiratory syndrome coronavirus 2
HVTYVPAQEKNF

SEQ ID NO: 20725 - protein, 17 aa, Severe acute respiratory syndrome-related coronavirus
  REGION 1..17: note = Table B: HLA-DRB3*02:01L HLA-DPA1*03:01-B1*04:02L HLA-DRB1*14:01L HLA-DQA1*01:01-B1*05:01L HLA-DRB1*08:01L HLA-DRB1*11:01L HLA-DPA1*01:03-B1*04:02L HLA-DPA1*01:02-B1*04:01L
  source 1..17: note = Severe acute respiratory syndrome coronavirus 2
VPAQEKNFTTAPAICHD

SEQ ID NO: 20726 - protein, 16 aa, Severe acute respiratory syndrome-related coronavirus
  REGION 1..16: note = Table B: HLA-DRB3*02:01L HLA-DPA1*03:01-B1*04:02L HLA-DRB1*11:02L HLA-DQA1*05:05-B1*03:19L HLA-DRB4*01:01L HLA-DPA1*01:03-B1*04:02L HLA-DQA1*05:05-B1*03:01L HLA-DQA1*01:03-B1*06:01L
  source 1..16: note = Severe acute respiratory syndrome coronavirus 2
APAICHDGKAHFPREG

SEQ ID NO: 20727 - protein, 11 aa, Severe acute respiratory syndrome-related coronavirus
  REGION 1..11: note = Table B: HLA-DRB3*02:01L HLA-DRB1*09:01L HLA-DPA1*01:03-B1*104:01L
  source 1..11: note = Severe acute respiratory syndrome coronavirus 2
GVFVSNGTHWF

SEQ ID NO: 20728 - protein, 16 aa, Severe acute respiratory syndrome-related coronavirus
  REGION 1..16: note = Table B: HLA-DRB3*02:01L HLA-DRB1*11:04L HLA-DRB1*14:02L HLA-DPA1*01:03-B1*04:01L HLA-DPA1*01:03-B1*04:02L HLA-DRB1*07:01L HLA-DRB1*10:01L
  source 1..16: note = Severe acute respiratory syndrome coronavirus 2
DPLQPELDSFKEELDK

SEQ ID NO: 20729 - protein, 12 aa, Severe acute respiratory syndrome-related coronavirus
  REGION 1..12: note = Table B: HLA-DRB3*02:01L
  source 1..12: note = Severe acute respiratory syndrome coronavirus 2
DGTTSPISEHDY

SEQ ID NO: 20730 - protein, 14 aa, Severe acute respiratory syndrome-related coronavirus
  REGION 1..14: note = Table B: HLA-DRB3*02:01L HLA-DQA1*01:01-B1*05:01L HLA-DRB1*04:10L HLA-DRB1*04:08L HLA-DRB1*08:03L
  source 1..14: note = Severe acute respiratory syndrome coronavirus 2
DYQIGGYTEKWESG

SEQ ID NO: 20731 - protein, 12 aa, Severe acute respiratory syndrome-related coronavirus
  REGION 1..12: note = Table B: HLA-DRB3*02:01L HLA-DRB1*11:03L HLA-DRB1*14:02L HLA-DRB1*11:01L HLA-DQA1*05:05-B1*03:19L HLA-DPA1*01:03-B1*04:01L HLA-DPA1*01:03-B1*02:01L HLA-DRB1*08:02L
  source 1..12: note = Severe acute respiratory syndrome coronavirus 2
FFIYNKIVDEPE

SEQ ID NO: 20732 - protein, 18 aa, Severe acute respiratory syndrome-related coronavirus
  REGION 1..18: note = Table B: HLA-DRB3*02:01L HLA-DRB1*03:01L HLA-DRB1*11:02L HLA-DRB1*08:02L
  source 1..18: note = Severe acute respiratory syndrome coronavirus 2
EHVQIHTIDGSSGVVNPV

SEQ ID NO: 20733 - protein, 12 aa, Severe acute respiratory syndrome-related coronavirus
  REGION 1..12: note = Table B: HLA-DRB3*02:01L HLA-DRB1*04:08L
  source 1..12: note = Severe acute respiratory syndrome coronavirus 2
NIVNVSLVKPSF

SEQ ID NO: 20734 - protein, 11 aa, Severe acute respiratory syndrome-related coronavirus
  REGION 1..11: note = Table B: HLA-DRB3*02:01L
  source 1..11: note = Severe acute respiratory syndrome coronavirus 2
VNVSLVKPSFY

SEQ ID NO: 20735 - protein, 15 aa, Severe acute respiratory syndrome-related coronavirus
  REGION 1..15: note = Table B: HLA-DRB3*02:01L HLA-DRB1*04:10L
  source 1..15: note = Severe acute respiratory syndrome coronavirus 2
ASQRVAGDSGFAAYS

SEQ ID NO: 20736 - protein, 13 aa, Severe acute respiratory syndrome-related coronavirus
  REGION 1..13: note = Table B: HLA-DRB3*02:01L HLA-DPA1*03:01-B1*04:02L HLA-DRB1*11:03L HLA-DRB1*14:02L HLA-DPA1*01:03-B1*04:02L HLA-DPA1*02:01-B1*13:01L HLA-DRB1*14:54L HLA-DPA1*01:03-B1*02:01L HLA-DRB1*08:02L HLA-DRB1*08:03L
  source 1..13: note = Severe acute respiratory syndrome coronavirus 2
DSGFAAYSRYRIG

SEQ ID NO: 20737 - protein, 17 aa, Severe acute respiratory syndrome-related coronavirus
  REGION 1..17: note = Table B: HLA-DRB3*02:01L HLA-DRB1*08:03L
  source 1..17: note = Severe acute respiratory syndrome coronavirus 2
SKSLTENKYSQLDEEQP

SEQ ID NO: 20738 - protein, 15 aa, Severe acute respiratory syndrome-related coronavirus
  REGION 1..15: note = Table B: HLA-DRB3*02:01L
  source 1..15: note = Severe acute respiratory syndrome coronavirus 2
SPKLFIRQEEVQELY

SEQ ID NO: 20739 - protein, 16 aa, Severe acute respiratory syndrome-related coronavirus
  REGION 1..16: note = Table B: HLA-DRB3*02:01L HLA-DRB1*11:03L HLA-DRB1*14:02L
  source 1..16: note = Severe acute respiratory syndrome coronavirus 2
ATKAYNVTQAFGRRGP

SEQ ID NO: 20740 - protein, 15 aa, Severe acute respiratory syndrome-related coronavirus
  REGION 1..15: note = Table B: HLA-DRB3*02:01L HLA-DRB1*11:04L
  source 1..15: note = Severe acute respiratory syndrome coronavirus 2
APSASAFFGMSRIGM

SEQ ID NO: 20741 - protein, 15 aa, Severe acute respiratory syndrome-related coronavirus
  REGION 1..15: note = Table B: HLA-DRB3*02:01L
  source 1..15: note = Severe acute respiratory syndrome coronavirus 2
GMSRIGMEVTPSGTW

SEQ ID NO: 20742 - protein, 16 aa, Severe acute respiratory syndrome-related coronavirus
  REGION 1..16: note = Table B: HLA-DRB3*02:01L
  source 1..16: note = Severe acute respiratory syndrome coronavirus 2
NKHIDAYKTFPPTEPK

SEQ ID NO: 20743 - protein, 18 aa, Severe acute respiratory syndrome-related coronavirus
  REGION 1..18: note = Table B: HLA-DRB3*02:01L
  source 1..18: note = Severe acute respiratory syndrome coronavirus 2
LPAADLDDFSKQLQQSMS

SEQ ID NO: 20744 - protein, 14 aa, Severe acute respiratory syndrome-related coronavirus
  REGION 1..14: note = Table B: HLA-DPA1*01:03-B1*03:01L HLA-DQA1*01:01-B1*05:01L HLA-DRB1*16:01L HLA-DRB1*04:08L
  source 1..14: note = Severe acute respiratory syndrome coronavirus 2
VEVEKGVLPQLEQP

SEQ ID NO: 20745 - protein, 17 aa, Severe acute respiratory syndrome-related coronavirus
  REGION 1..17: note = Table B: HLA-DPA1*01:03-B1*03:01L HLA-DPA1*01:03-B1*104:01L HLA-DQA1*01:03-B1*06:01L
  source 1..17: note = Severe acute respiratory syndrome coronavirus 2
EQPYVFIKRSDARTAPH

SEQ ID NO: 20746 - protein, 18 aa, Severe acute respiratory syndrome-related coronavirus
  REGION 1..18: note = Table B: HLA-DPA1*01:03-B1*03:01L
  source 1..18: note = Severe acute respiratory syndrome coronavirus 2
QPYVFIKRSDARTAPHGH

SEQ ID NO: 20747 - protein, 14 aa, Severe acute respiratory syndrome-related coronavirus
  REGION 1..14: note = Table B: HLA-DPA1*01:03-B1*03:01L
  source 1..14: note = Severe acute respiratory syndrome coronavirus 2
HGHVMVELVAELEG

SEQ ID NO: 20748 - protein, 13 aa, Severe acute respiratory syndrome-related coronavirus
  REGION 1..13: note = Table B: HLA-DPA1*01:03-B1*03:01L HLA-DPA1*02:01-B1*13:01L
  source 1..13: note = Severe acute respiratory syndrome coronavirus 2
LGDELGTDPYEDF

SEQ ID NO: 20749 - protein, 12 aa, Severe acute respiratory syndrome-related coronavirus
  REGION 1..12: note = Table B: HLA-DPA1*01:03-B1*03:01L HLA-DRB1*11:02L HLA-DQA1*05:05-B1*03:19L HLA-DPA1*01:03-B1*104:01L HLA-DRB1*16:01L
  source 1..12: note = Severe acute respiratory syndrome coronavirus 2
GTDPYEDFQENW

SEQ ID NO: 20750 - protein, 13 aa, Severe acute respiratory syndrome-related coronavirus
  REGION 1..13: note = Table B: HLA-DPA1*01:03-B1*03:01L HLA-DPA1*02:01-B1*13:01L HLA-DRB1*07:01L HLA-DRB1*15:03L
  source 1..13: note = Severe acute respiratory syndrome coronavirus 2
WNTKHSSGVTREL

SEQ ID NO: 20751 - protein, 15 aa, Severe acute respiratory syndrome-related coronavirus
  REGION 1..15: note = Table B: HLA-DPA1*01:03-B1*03:01L
  source 1..15: note = Severe acute respiratory syndrome coronavirus 2
AYTRYVDNNFCGPDG

SEQ ID NO: 20752 - protein, 15 aa, Severe acute respiratory syndrome-related coronavirus
  REGION 1..15: note = Table B: HLA-DPA1*01:03-B1*03:01L HLA-DPA1*03:01-B1*04:02L HLA-DRB1*15:03L
  source 1..15: note = Severe acute respiratory syndrome coronavirus 2
GPDGYPLECIKDLLA

SEQ ID NO: 20753 - protein, 19 aa, Severe acute respiratory syndrome-related coronavirus
  REGION 1..19: note = Table B: HLA-DPA1*01:03-B1*03:01L HLA-DPA1*01:03-B1*04:02L
  source 1..19: note = Severe acute respiratory syndrome coronavirus 2
PDGYPLECIKDLLARAGKA

SEQ ID NO: 20754 - protein, 16 aa, Severe acute respiratory syndrome-related coronavirus
  REGION 1..16: note = Table B: HLA-DPA1*01:03-B1*03:01L HLA-DPA1*01:03-B1*04:02L HLA-DRB1*15:03L
  source 1..16: note = Severe acute respiratory syndrome coronavirus 2
EGATTCGYLPQNAVVK

SEQ ID NO: 20755 - protein, 18 aa, Severe acute respiratory syndrome-related coronavirus
  REGION 1..18: note = Table B: HLA-DPA1*01:03-B1*03:01L HLA-DPA1*01:03-B1*04:01L HLA-DPA1*02:01-B1*13:01L HLA-DQA1*05:05-B1*03:01L
  source 1..18: note = Severe acute respiratory syndrome coronavirus 2
EGSEGLNDNLLEILQKEK

SEQ ID NO: 20756 - protein, 14 aa, Severe acute respiratory syndrome-related coronavirus
  REGION 1..14: note = Table B: HLA-DPA1*01:03-B1*03:01L
  source 1..14: note = Severe acute respiratory syndrome coronavirus 2
AIILASFSASTSAF

SEQ ID NO: 20757 - protein, 13 aa, Severe acute respiratory syndrome-related coronavirus
  REGION 1..13: note = Table B: HLA-DPA1*01:03-B1*03:01L HLA-DPA1*03:01-B1*04:02L HLA-DPA1*01:03-B1*04:01L HLA-DPA1*01:02-B1*04:01L HLA-DRB1*15:03L
  source 1..13: note = Severe acute respiratory syndrome coronavirus 2
FSASTSAFVETVK

SEQ ID NO: 20758 - protein, 11 aa, Severe acute respiratory syndrome-related coronavirus
  REGION 1..11: note = Table B: HLA-DPA1*01:03-B1*03:01L HLA-DQA1*01:01-B1*05:01L HLA-DRB4*02:01NL HLA-DRB1*04:10L HLA-DRB1*09:01L
  source 1..11: note = Severe acute respiratory syndrome coronavirus 2
AFASEAARVVR

SEQ ID NO: 20759 - protein, 13 aa, Severe acute respiratory syndrome-related coronavirus
  REGION 1..13: note = Table B: HLA-DPA1*01:03-B1*03:01L
  source 1..13: note = Severe acute respiratory syndrome coronavirus 2
NSVRVLQKAAITI

SEQ ID NO: 20760 - protein, 13 aa, Severe acute respiratory syndrome-related coronavirus
  REGION 1..13: note = Table B: HLA-DPA1*01:03-B1*03:01L
  source 1..13: note = Severe acute respiratory syndrome coronavirus 2
LRLIDAMMFTSDL

SEQ ID NO: 20761 - protein, 13 aa, Severe acute respiratory syndrome-related coronavirus
  REGION 1..13: note = Table B: HLA-DPA1*01:03-B1*03:01L HLA-DRB1*14:17L
  source 1..13: note = Severe acute respiratory syndrome coronavirus 2
AYITGGVVQLTSQ

SEQ ID NO: 20762 - protein, 14 aa, Severe acute respiratory syndrome-related coronavirus
  REGION 1..14: note = Table B: HLA-DPA1*01:03-B1*03:01L HLA-DRB1*14:02L HLA-DRB1*09:01L HLA-DRB1*12:02L
  source 1..14: note = Severe acute respiratory syndrome coronavirus 2
TGGVVQLTSQWLTN

SEQ ID NO: 20763 - protein, 17 aa, Severe acute respiratory syndrome-related coronavirus
  REGION 1..17: note = Table B: HLA-DPA1*01:03-B1*03:01L
  source 1..17: note = Severe acute respiratory syndrome coronavirus 2
EKLKPVLDWLEEKFKEG

SEQ ID NO: 20764 - protein, 16 aa, Severe acute respiratory syndrome-related coronavirus
  REGION 1..16: note = Table B: HLA-DPA1*01:03-B1*03:01L
  source 1..16: note = Severe acute respiratory syndrome coronavirus 2
TFFKLVNKFLALCADS

SEQ ID NO: 20765 - protein, 13 aa, Severe acute respiratory syndrome-related coronavirus
  REGION 1..13: note = Table B: HLA-DPA1*01:03-B1*03:01L HLA-DPA1*02:01-B1*13:01L HLA-DRB1*15:03L
  source 1..13: note = Severe acute respiratory syndrome coronavirus 2
LVNKFLALCADSI

SEQ ID NO: 20766 - protein, 15 aa, Severe acute respiratory syndrome-related coronavirus
  REGION 1..15: note = Table B: HLA-DPA1*01:03-B1*03:01L HLA-DPA1*02:01-B1*13:01L
  source 1..15: note = Severe acute respiratory syndrome coronavirus 2
IIGGAKLKALNLGET

SEQ ID NO: 20767 - protein, 13 aa, Severe acute respiratory syndrome-related coronavirus
  REGION 1..13: note = Table B: HLA-DPA1*01:03-B1*03:01L HLA-DPA1*03:01-B1*04:02L HLA-DQA1*01-B1*05L HLA-DPA1*01:03-B1*04:02L
  source 1..13: note = Severe acute respiratory syndrome coronavirus 2
IIFLEGETLPTEV

SEQ ID NO: 20768 - protein, 14 aa, Severe acute respiratory syndrome-related coronavirus
  REGION 1..14: note = Table B: HLA-DPA1*01:03-B1*03:01L
  source 1..14: note = Severe acute respiratory syndrome coronavirus 2
EVLTEEVVLKTGDL

SEQ ID NO: 20769 - protein, 16 aa, Severe acute respiratory syndrome-related coronavirus
  REGION 1..16: note = Table B: HLA-DPA1*01:03-B1*03:01L HLA-DPA1*03:01-B1*105:01L
  source 1..16: note = Severe acute respiratory syndrome coronavirus 2
QPTSEAVEAPLVGTPV

SEQ ID NO: 20770 - protein, 16 aa, Severe acute respiratory syndrome-related coronavirus
  REGION 1..16: note = Table B: HLA-DPA1*01:03-B1*03:01L
  source 1..16: note = Severe acute respiratory syndrome coronavirus 2
MMVTNNTFTLKGGAPT

SEQ ID NO: 20771 - protein, 13 aa, Severe acute respiratory syndrome-related coronavirus
  REGION 1..13: note = Table B: HLA-DPA1*01:03-B1*03:01L HLA-DQA1*05:01-B1*02:01L HLA-DQA1*05:05-B1*03:116L HLA-DPA1*01:03-B1*04:02L HLA-DRB1*04:08L HLA-DRB1*15:03L
  source 1..13: note = Severe acute respiratory syndrome coronavirus 2
TFTLKGGAPTKVT

SEQ ID NO: 20772 - protein, 12 aa, Severe acute respiratory syndrome-related coronavirus
  REGION 1..12: note = Table B: HLA-DPA1*01:03-B1*03:01L
  source 1..12: note = Severe acute respiratory syndrome coronavirus 2
TFELDERIDKVL

SEQ ID NO: 20773 - protein, 14 aa, Severe acute respiratory syndrome-related coronavirus
  REGION 1..14: note = Table B: HLA-DPA1*01:03-B1*03:01L
  source 1..14: note = Severe acute respiratory syndrome coronavirus 2
VIKTLQPVSELLTP

SEQ ID NO: 20774 - protein, 10 aa, Severe acute respiratory syndrome-related coronavirus
  REGION 1..10: note = Table B: HLA-DPA1*01:03-B1*03:01L HLA-DRB1*03:01L HLA-DRB1*11:02L HLA-DQA1*01-B1*05L HLA-DQA1*05:05-B1*03:19M HLA-DQA1*05:01-B1*02:01L HLA-DPA1*01:03-B1*104:01L HLA-DRB1*16:01L
  source 1..10: note = Severe acute respiratory syndrome coronavirus 2
LDEWSMATYY

SEQ ID NO: 20775 - protein, 12 aa, Severe acute respiratory syndrome-related coronavirus
  REGION 1..12: note = Table B: HLA-DPA1*01:03-B1*03:01L HLA-DQA1*01:01-B1*05:01L HLA-DRB1*08:01L HLA-DRB1*12:01L HLA-DRB1*04:08L
  source 1..12: note = Severe acute respiratory syndrome coronavirus 2
EDDYQGKPLEFG

SEQ ID NO: 20776 - protein, 13 aa, Severe acute respiratory syndrome-related coronavirus
  REGION 1..13: note = Table B: HLA-DPA1*01:03-B1*03:01L
  source 1..13: note = Severe acute respiratory syndrome coronavirus 2
EDNQTTTIQTIVE

SEQ ID NO: 20777 - protein, 13 aa, Severe acute respiratory syndrome-related coronavirus
  REGION 1..13: note = Table B: HLA-DPA1*01:03-B1*03:01L HLA-DRB1*12:01L
  source 1..13: note = Severe acute respiratory syndrome coronavirus 2
LEMELTPVVQTIE

SEQ ID NO: 20778 - protein, 14 aa, Severe acute respiratory syndrome-related coronavirus
  REGION 1..14: note = Table B: HLA-DPA1*01:03-B1*03:01L HLA-DPA1*03:01-B1*04:02L HLA-DPA1*02:01-B1*13:01L
  source 1..14: note = Severe acute respiratory syndrome coronavirus 2
YLKLTDNVYIKNAD

SEQ ID NO: 20779 - protein, 18 aa, Severe acute respiratory syndrome-related coronavirus
  REGION 1..18: note = Table B: HLA-DPA1*01:03-B1*03:01L
  source 1..18: note = Severe acute respiratory syndrome coronavirus 2
IKNADIVEEAKKVKPTVV

SEQ ID NO: 20780 - protein, 14 aa, Severe acute respiratory syndrome-related coronavirus
  REGION 1..14: note = Table B: HLA-DPA1*01:03-B1*03:01L HLA-DRB1*14:02L
  source 1..14: note = Severe acute respiratory syndrome coronavirus 2
NVYLKHGGGVAGAL

SEQ ID NO: 20781 - protein, 12 aa, Severe acute respiratory syndrome-related coronavirus
  REGION 1..12: note = Table B: HLA-DPA1*01:03-B1*03:01L HLA-DPA1*03:01-B1*04:02L
  source 1..12: note = Severe acute respiratory syndrome coronavirus 2
LYDKLVSSFLEM

SEQ ID NO: 20782 - protein, 16 aa, Severe acute respiratory syndrome-related coronavirus
  REGION 1..16: note = Table B: HLA-DPA1*01:03-B1*03:01L
  source 1..16: note = Severe acute respiratory syndrome coronavirus 2
DKKIKACVEEVTTTLE

SEQ ID NO: 20783 - protein, 17 aa, Severe acute respiratory syndrome-related coronavirus
  REGION 1..17: note = Table B: HLA-DPA1*01:03-B1*03:01L
  source 1..17: note = Severe acute respiratory syndrome coronavirus 2
GTTEMLAKALRKVPTDN

SEQ ID NO: 20784 - protein, 12 aa, Severe acute respiratory syndrome-related coronavirus
  REGION 1..12: note = Table B: HLA-DPA1*01:03-B1*03:01L HLA-DPA1*03:01-B1*04:02L HLA-DRB1*15:03L
  source 1..12: note = Severe acute respiratory syndrome coronavirus 2
NEKQEILGTVSW

SEQ ID NO: 20785 - protein, 12 aa, Severe acute respiratory syndrome-related coronavirus
  REGION 1..12: note = Table B: HLA-DPA1*01:03-B1*03:01L HLA-DQA1*01-B1*05L HLA-DRB1*04:10L HLA-DPA1*02:01-B1*13:01L
  source 1..12: note = Severe acute respiratory syndrome coronavirus 2
QEILGTVSWNLR

SEQ ID NO: 20786 - protein, 12 aa, Severe acute respiratory syndrome-related coronavirus
  REGION 1..12: note = Table B: HLA-DPA1*01:03-B1*03:01L HLA-DQA1*01-B1*05L
  source 1..12: note = Severe acute respiratory syndrome coronavirus 2
EILGTVSWNLRE

SEQ ID NO: 20787 - protein, 18 aa, Severe acute respiratory syndrome-related coronavirus
  REGION 1..18: note = Table B: HLA-DPA1*01:03-B1*03:01L HLA-DRB1*14:02L HLA-DQA1*05:01-B1*02:01L
  source 1..18: note = Severe acute respiratory syndrome coronavirus 2
NLREMLAHAEETRKLMPV

SEQ ID NO: 20788 - protein, 13 aa, Severe acute respiratory syndrome-related coronavirus
  REGION 1..13: note = Table B: HLA-DPA1*01:03-B1*03:01L
  source 1..13: note = Severe acute respiratory syndrome coronavirus 2
SKTTVASLINTLN

SEQ ID NO: 20789 - protein, 15 aa, Severe acute respiratory syndrome-related coronavirus
  REGION 1..15: note = Table B: HLA-DPA1*01:03-B1*03:01L HLA-DRB1*10:01L
  source 1..15: note = Severe acute respiratory syndrome coronavirus 2
KTTVASLINTLNDLN

SEQ ID NO: 20790 - protein, 14 aa, Severe acute respiratory syndrome-related coronavirus
  REGION 1..14: note = Table B: HLA-DPA1*01:03-B1*03:01L HLA-DQA1*05:05-B1*03:01L
  source 1..14: note = Severe acute respiratory syndrome coronavirus 2
LINTLNDLNETLVT

SEQ ID NO: 20791 - protein, 14 aa, Severe acute respiratory syndrome-related coronavirus
  REGION 1..14: note = Table B: HLA-DPA1*01:03-B1*03:01L HLA-DRB1*12:01L
  source 1..14: note = Severe acute respiratory syndrome coronavirus 2
RSLKVPATVSVSSP

SEQ ID NO: 20792 - protein, 10 aa, Severe acute respiratory syndrome-related coronavirus
  REGION 1..10: note = Table B: HLA-DPA1*01:03-B1*03:01L HLA-DQA1*05:05-B1*03:19L HLA-DQA1*05:01-B1*02:01L HLA-DPA1*01:03-B1*104:01L HLA-DRB1*16:01L
  source 1..10: note = Severe acute respiratory syndrome coronavirus 2
LAGSYKDWSY

SEQ ID NO: 20793 - protein, 13 aa, Severe acute respiratory syndrome-related coronavirus
  REGION 1..13: note = Table B: HLA-DPA1*01:03-B1*03:01L HLA-DRB1*08:01L HLA-DPA1*02:01-B1*13:01L HLA-DQA1*01:03-B1*06:01L HLA-DRB1*04:08L
  source 1..13: note = Severe acute respiratory syndrome coronavirus 2
SYKDWSYSGQSTQ

SEQ ID NO: 20794 - protein, 13 aa, Severe acute respiratory syndrome-related coronavirus
  REGION 1..13: note = Table B: HLA-DPA1*01:03-B1*03:01L HLA-DRB1*12:01L
  source 1..13: note = Severe acute respiratory syndrome coronavirus 2
WSYSGQSTQLGIE

SEQ ID NO: 20795 - protein, 18 aa, Severe acute respiratory syndrome-related coronavirus
  REGION 1..18: note = Table B: HLA-DPA1*01:03-B1*03:01L HLA-DPA1*01:03-B1*104:01L
  source 1..18: note = Severe acute respiratory syndrome coronavirus 2
SGQSTQLGIEFLKRGDKS

SEQ ID NO: 20796 - protein, 18 aa, Severe acute respiratory syndrome-related coronavirus
  REGION 1..18: note = Table B: HLA-DPA1*01:03-B1*03:01L
  source 1..18: note = Severe acute respiratory syndrome coronavirus 2
TFDNLKTLLSLREVRTIK

SEQ ID NO: 20797 - protein, 16 aa, Severe acute respiratory syndrome-related coronavirus
  REGION 1..16: note = Table B: HLA-DPA1*01:03-B1*03:01L HLA-DRB1*11:03L HLA-DRB1*14:02L HLA-DPA1*01:03-B1*104:01L HLA-DPA1*01:02-B1*04:01L HLA-DRB1*08:03L
  source 1..16: note = Severe acute respiratory syndrome coronavirus 2
DGADVTKIKPHNSHEG

SEQ ID NO: 20798 - protein, 18 aa, Severe acute respiratory syndrome-related coronavirus
  REGION 1..18: note = Table B: HLA-DPA1*01:03-B1*03:01L
  source 1..18: note = Severe acute respiratory syndrome coronavirus 2
GADVTKIKPHNSHEGKTF

SEQ ID NO: 20799 - protein, 10 aa, Severe acute respiratory syndrome-related coronavirus
  REGION 1..10: note = Table B: HLA-DPA1*01:03-B1*03:01L HLA-DQA1*01-B1*05L HLA-DQA1*05:05-B1*03:19L HLA-DQA1*05:01-B1*02:01L HLA-DRB1*10:01L HLA-DRB1*16:01L
  source 1..10: note = Severe acute respiratory syndrome coronavirus 2
NDDTLRVEAF

SEQ ID NO: 20800 - protein, 12 aa, Severe acute respiratory syndrome-related coronavirus
  REGION 1..12: note = Table B: HLA-DPA1*01:03-B1*03:01L HLA-DRB1*10:01L HLA-DRB1*04:08L
  source 1..12: note = Severe acute respiratory syndrome coronavirus 2
YYHTTDPSFLGR

SEQ ID NO: 20801 - protein, 18 aa, Severe acute respiratory syndrome-related coronavirus
  REGION 1..18: note = Table B: HLA-DPA1*01:03-B1*03:01L HLA-DRB1*11:02L HLA-DRB1*14:02L
  source 1..18: note = Severe acute respiratory syndrome coronavirus 2
LGRYMSALNHTKKWKYPQ

SEQ ID NO: 20802 - protein, 14 aa, Severe acute respiratory syndrome-related coronavirus
  REGION 1..14: note = Table B: HLA-DPA1*01:03-B1*03:01L HLA-DPA1*01:03-B1*104:01L HLA-DRB1*15:03L
  source 1..14: note = Severe acute respiratory syndrome coronavirus 2
HTKKWKYPQVNGLT

SEQ ID NO: 20803 - protein, 12 aa, Severe acute respiratory syndrome-related coronavirus
  REGION 1..12: note = Table B: HLA-DPA1*01:03-B1*03:01L HLA-DQA1*05:05-B1*03:19L HLA-DPA1*01:03-B1*04:01L HLA-DRB1*12:01L HLA-DRB1*15:03L
  source 1..12: note = Severe acute respiratory syndrome coronavirus 2
NGLTSIKWADNN

SEQ ID NO: 20804 - protein, 16 aa, Severe acute respiratory syndrome-related coronavirus
  REGION 1..16: note = Table B: HLA-DPA1*01:03-B1*03:01L HLA-DRB1*14:02L
  source 1..16: note = Severe acute respiratory syndrome coronavirus 2
SYLFQHANLDSCKRVL

SEQ ID NO: 20805 - protein, 16 aa, Severe acute respiratory syndrome-related coronavirus
  REGION 1..16: note = Table B: HLA-DPA1*01:03-B1*03:01L
  source 1..16: note = Severe acute respiratory syndrome coronavirus 2
EQFKKGVQIPCTCGKQ

SEQ ID NO: 20806 - protein, 14 aa, Severe acute respiratory syndrome-related coronavirus
  REGION 1..14: note = Table B: HLA-DPA1*01:03-B1*03:01L HLA-DPA1*02:01-B1*13:01L HLA-DPA1*03:01-B1*105:01L HLA-DQA1*05:05-B1*03:01L HLA-DQA1*01:03-B1*06:01L
  source 1..14: note = Severe acute respiratory syndrome coronavirus 2
YELKHGTFTCASEY

SEQ ID NO: 20807 - protein, 14 aa, Severe acute respiratory syndrome-related coronavirus
  REGION 1..14: note = Table B: HLA-DPA1*01:03-B1*03:01L HLA-DPA1*02:01-B1*13:01L HLA-DQA1*05:05-B1*03:01L HLA-DQA1*01:03-B1*06:01L HLA-DQA1*02:01-B1*03:03L
  source 1..14: note = Severe acute respiratory syndrome coronavirus 2
ELKHGTFTCASEYT

SEQ ID NO: 20808 - protein, 15 aa, Severe acute respiratory syndrome-related coronavirus
  REGION 1..15: note = Table B: HLA-DPA1*01:03-B1*03:01L HLA-DRB1*03:01L HLA-DPA1*01:03-B1*04:02L
  source 1..15: note = Severe acute respiratory syndrome coronavirus 2
ETLYCIDGALLTKSS

SEQ ID NO: 20809 - protein, 16 aa, Severe acute respiratory syndrome-related coronavirus
  REGION 1..16: note = Table B: HLA-DPA1*01:03-B1*03:01L HLA-DRB1*04:08L
  source 1..16: note = Severe acute respiratory syndrome coronavirus 2
VTYKLDGVVCTEIDPK

SEQ ID NO: 20810 - protein, 17 aa, Severe acute respiratory syndrome-related coronavirus
  REGION 1..17: note = Table B: HLA-DPA1*01:03-B1*03:01L HLA-DPA1*03:01-B1*105:01L
  source 1..17: note = Severe acute respiratory syndrome coronavirus 2
DPKLDNYYKKDNSYFTE

SEQ ID NO: 20811 - protein, 15 aa, Severe acute respiratory syndrome-related coronavirus
  REGION 1..15: note = Table B: HLA-DPA1*01:03-B1*03:01L HLA-DPA1*03:01-B1*04:02L HLA-DRB1*03:01L HLA-DRB1*11:04L HLA-DRB1*14:02L HLA-DRB1*11:01L HLA-DQA1*01-B1*05L HLA-DQA1*05:01-B1*02:01L HLA-DPA1*01:03-B1*04:02L HLA-DPA1*01:02-B1*04:01L
  source 1..15: note = Severe acute respiratory syndrome coronavirus 2
DNYYKKDNSYFTEQP

SEQ ID NO: 20812 - protein, 10 aa, Severe acute respiratory syndrome-related coronavirus
  REGION 1..10: note = Table B: HLA-DPA1*01:03-B1*03:01L HLA-DQA1*05:05-B1*03:19L HLA-DQA1*05:01-B1*02:01L HLA-DPA1*01:03-B1*104:01L HLA-DRB1*16:01L
  source 1..10: note = Severe acute respiratory syndrome coronavirus 2
PIDLVPNQPY

SEQ ID NO: 20813 - protein, 16 aa, Severe acute respiratory syndrome-related coronavirus
  REGION 1..16: note = Table B: HLA-DPA1*01:03-B1*03:01L HLA-DPA1*03:01-B1*04:02L HLA-DRB1*14:02L HLA-DQA1*05:01-B1*02:01L HLA-DPA1*01:03-B1*04:02L HLA-DQA1*01:03-B1*06:01L
  source 1..16: note = Severe acute respiratory syndrome coronavirus 2
NFKFVCDNIKFADDLN

SEQ ID NO: 20814 - protein, 16 aa, Severe acute respiratory syndrome-related coronavirus
  REGION 1..16: note = Table B: HLA-DPA1*01:03-B1*03:01L HLA-DPA1*01:03-B1*104:01L
  source 1..16: note = Severe acute respiratory syndrome coronavirus 2
DLNQLTGYKKPASREL

SEQ ID NO: 20815 - protein, 18 aa, Severe acute respiratory syndrome-related coronavirus
  REGION 1..18: note = Table B: HLA-DPA1*01:03-B1*03:01L HLA-DPA1*03:01-B1*105:01L HLA-DPA1*01:03-B1*104:01L
  source 1..18: note = Severe acute respiratory syndrome coronavirus 2
GAKLLHKPIVWHVNNATN

SEQ ID NO: 20816 - protein, 13 aa, Severe acute respiratory syndrome-related coronavirus
  REGION 1..13: note = Table B: HLA-DPA1*01:03-B1*03:01L HLA-DQA1*05:01-B1*02:01L HLA-DPA1*03:01-B1*105:01L HLA-DRB1*15:03L
  source 1..13: note = Severe acute respiratory syndrome coronavirus 2
NATNKATYKPNTW

SEQ ID NO: 20817 - protein, 16 aa, Severe acute respiratory syndrome-related coronavirus
  REGION 1..16: note = Table B: HLA-DPA1*01:03-B1*03:01L
  source 1..16: note = Severe acute respiratory syndrome coronavirus 2
NPTIQKDVLECNVKTT

SEQ ID NO: 20818 - protein, 17 aa, Severe acute respiratory syndrome-related coronavirus
  REGION 1..17: note = Table B: HLA-DPA1*01:03-B1*03:01L HLA-DPA1*02:01-B1*13:01L
  source 1..17: note = Severe acute respiratory syndrome coronavirus 2
IQKDVLECNVKTTEVVG

SEQ ID NO: 20819 - protein, 18 aa, Severe acute respiratory syndrome-related coronavirus
  REGION 1..18: note = Table B: HLA-DPA1*01:03-B1*03:01L HLA-DPA1*01:03-B1*104:01L
  source 1..18: note = Severe acute respiratory syndrome coronavirus 2
KPNELSRVLGLKTLATHG

SEQ ID NO: 20820 - protein, 13 aa, Severe acute respiratory syndrome-related coronavirus
  REGION 1..13: note = Table B: HLA-DPA1*01:03-B1*03:01L HLA-DRB1*04:08L
  source 1..13: note = Severe acute respiratory syndrome coronavirus 2
LKTLATHGLAAVN

SEQ ID NO: 20821 - protein, 15 aa, Severe acute respiratory syndrome-related coronavirus
  REGION 1..15: note = Table B: HLA-DPA1*01:03-B1*03:01L HLA-DPA1*02:01-B1*13:01L
  source 1..15: note = Severe acute respiratory syndrome coronavirus 2
IVTRCLNRVCTNYMP

SEQ ID NO: 20822 - protein, 12 aa, Severe acute respiratory syndrome-related coronavirus
  REGION 1..12: note = Table B: HLA-DPA1*01:03-B1*03:01L HLA-DPA1*02:01-B1*13:01L
  source 1..12: note = Severe acute respiratory syndrome coronavirus 2
LNRVCTNYMPYF

SEQ ID NO: 20823 - protein, 13 aa, Severe acute respiratory syndrome-related coronavirus
  REGION 1..13: note = Table B: HLA-DPA1*01:03-B1*03:01L
  source 1..13: note = Severe acute respiratory syndrome coronavirus 2
IKASMPTTIAKNT

SEQ ID NO: 20824 - protein, 16 aa, Severe acute respiratory syndrome-related coronavirus
  REGION 1..16: note = Table B: HLA-DPA1*01:03-B1*03:01L HLA-DPA1*01:03-B1*104:01L
  source 1..16: note = Severe acute respiratory syndrome coronavirus 2
NTVKSVGKFCLEASFN

SEQ ID NO: 20825 - protein, 13 aa, Severe acute respiratory syndrome-related coronavirus
  REGION 1..13: note = Table B: HLA-DPA1*01:03-B1*03:01L HLA-DPA1*03:01-B1*04:02L HLA-DPA1*02:01-B1*13:01L HLA-DPA1*03:01-B1*105:01L HLA-DPA1*01:03-B1*104:01L
  source 1..13: note = Severe acute respiratory syndrome coronavirus 2
SVGKFCLEASFNY

SEQ ID NO: 20826 - protein, 11 aa, Severe acute respiratory syndrome-related coronavirus
  REGION 1..11: note = Table B: HLA-DPA1*01:03-B1*03:01L
  source 1..11: note = Severe acute respiratory syndrome coronavirus 2
LAYILFTRFFY

SEQ ID NO: 20827 - protein, 12 aa, Severe acute respiratory syndrome-related coronavirus
  REGION 1..12: note = Table B: HLA-DPA1*01:03-B1*03:01L HLA-DPA1*02:01-B1*13:01L
  source 1..12: note = Severe acute respiratory syndrome coronavirus 2
FFSYFAVHFISN

SEQ ID NO: 20828 - protein, 12 aa, Severe acute respiratory syndrome-related coronavirus
  REGION 1..12: note = Table B: HLA-DPA1*01:03-B1*03:01L HLA-DPA1*01:03-B1*04:02L
  source 1..12: note = Severe acute respiratory syndrome coronavirus 2
AVHFISNSWLMW

SEQ ID NO: 20829 - protein, 13 aa, Severe acute respiratory syndrome-related coronavirus
  REGION 1..13: note = Table B: HLA-DPA1*01:03-B1*03:01L
  source 1..13: note = Severe acute respiratory syndrome coronavirus 2
FYYVWKSYVHVVD

SEQ ID NO: 20830 - protein, 16 aa, Severe acute respiratory syndrome-related coronavirus
  REGION 1..16: note = Table B: HLA-DPA1*01:03-B1*03:01L
  source 1..16: note = Severe acute respiratory syndrome coronavirus 2
VWKSYVHVVDGCNSST

SEQ ID NO: 20831 - protein, 18 aa, Severe acute respiratory syndrome-related coronavirus
  REGION 1..18: note = Table B: HLA-DPA1*01:03-B1*03:01L HLA-DPA1*03:01-B1*04:02L HLA-DQA1*05:05-B1*03:116L HLA-DPA1*01:03-B1*02:01L HLA-DPA1*01:03-B1*104:01L HLA-DPA1*01:02-B1*04:01L
  source 1..18: note = Severe acute respiratory syndrome coronavirus 2
VARDLSLQFKRPINPTDQ

SEQ ID NO: 20832 - protein, 14 aa, Severe acute respiratory syndrome-related coronavirus
  REGION 1..14: note = Table B: HLA-DPA1*01:03-B1*03:01L HLA-DPA1*02:01-B1*13:01L
  source 1..14: note = Severe acute respiratory syndrome coronavirus 2
ANNTKGSLPINVIV

SEQ ID NO: 20833 - protein, 14 aa, Severe acute respiratory syndrome-related coronavirus
  REGION 1..14: note = Table B: HLA-DPA1*01:03-B1*03:01L
  source 1..14: note = Severe acute respiratory syndrome coronavirus 2
NTKGSLPINVIVFD

SEQ ID NO: 20834 - protein, 14 aa, Severe acute respiratory syndrome-related coronavirus
  REGION 1..14: note = Table B: HLA-DPA1*01:03-B1*03:01L
  source 1..14: note = Severe acute respiratory syndrome coronavirus 2
ELAKNVSLDNVLST

SEQ ID NO: 20835 - protein, 16 aa, Severe acute respiratory syndrome-related coronavirus
  REGION 1..16: note = Table B: HLA-DPA1*01:03-B1*03:01L HLA-DPA1*03:01-B1*04:02L HLA-DRB1*11:02L HLA-DRB1*14:02L HLA-DQA1*05:05-B1*03:19L HLA-DPA1*01:03-B1*04:02L HLA-DPA1*01:03-B1*104:01L HLA-DRB1*08:02L
  source 1..16: note = Severe acute respiratory syndrome coronavirus 2
KDVVECLKLSHQSDIE

SEQ ID NO: 20836 - protein, 14 aa, Severe acute respiratory syndrome-related coronavirus
  REGION 1..14: note = Table B: HLA-DPA1*01:03-B1*03:01L HLA-DPA1*03:01-B1*04:02L HLA-DRB1*14:02L HLA-DQA1*05:05-B1*03:19L HLA-DPA1*01:03-B1*04:02L HLA-DPA1*01:03-B1*02:01L
  source 1..14: note = Severe acute respiratory syndrome coronavirus 2
MLTYNKVENMTPRD

SEQ ID NO: 20837 - protein, 17 aa, Severe acute respiratory syndrome-related coronavirus
  REGION 1..17: note = Table B: HLA-DPA1*01:03-B1*03:01L
  source 1..17: note = Severe acute respiratory syndrome coronavirus 2
TPRDLGACIDCSARHIN

SEQ ID NO: 20838 - protein, 15 aa, Severe acute respiratory syndrome-related coronavirus
  REGION 1..15: note = Table B: HLA-DPA1*01:03-B1*03:01L
  source 1..15: note = Severe acute respiratory syndrome coronavirus 2
ARHINAQVAKSHNIA

SEQ ID NO: 20839 - protein, 15 aa, Severe acute respiratory syndrome-related coronavirus
  REGION 1..15: note = Table B: HLA-DPA1*01:03-B1*03:01L HLA-DQA1*05:05-B1*03:19L
  source 1..15: note = Severe acute respiratory syndrome coronavirus 2
NVKDFMSLSEQLRKQ

SEQ ID NO: 20840 - protein, 12 aa, Severe acute respiratory syndrome-related coronavirus
  REGION 1..12: note = Table B: HLA-DPA1*01:03-B1*03:01L HLA-DPA1*03:01-B1*04:02L HLA-DQA1*05:01-B1*02:01L HLA-DPA1*01:03-B1*04:02L
  source 1..12: note = Severe acute respiratory syndrome coronavirus 2
IALKGGKIVNNW

SEQ ID NO: 20841 - protein, 15 aa, Severe acute respiratory syndrome-related coronavirus
  REGION 1..15: note = Table B: HLA-DPA1*01:03-B1*03:01L HLA-DRB1*03:01L HLA-DRB1*11:02L
  source 1..15: note = Severe acute respiratory syndrome coronavirus 2
GKIVNNWLKQLIKVT

SEQ ID NO: 20842 - protein, 15 aa, Severe acute respiratory syndrome-related coronavirus
  REGION 1..15: note = Table B: HLA-DPA1*01:03-B1*03:01L HLA-DRB1*03:01L HLA-DRB1*13:01L HLA-DQA1*03:01-B1*03:02L HLA-DRB1*14:54L HLA-DPA1*01:03-B1*104:01L HLA-DRB1*07:01L
  source 1..15: note = Severe acute respiratory syndrome coronavirus 2
GDFLHFLPRVFSAVG

SEQ ID NO: 20843 - protein, 15 aa, Severe acute respiratory syndrome-related coronavirus
  REGION 1..15: note = Table B: HLA-DPA1*01:03-B1*03:01L
  source 1..15: note = Severe acute respiratory syndrome coronavirus 2
DFLHFLPRVFSAVGN

SEQ ID NO: 20844 - protein, 13 aa, Severe acute respiratory syndrome-related coronavirus
  REGION 1..13: note = Table B: HLA-DPA1*01:03-B1*03:01L HLA-DRB1*12:01L HLA-DRB1*15:03L
  source 1..13: note = Severe acute respiratory syndrome coronavirus 2
TNVLEGSVAYESL

SEQ ID NO: 20845 - protein, 13 aa, Severe acute respiratory syndrome-related coronavirus
  REGION 1..13: note = Table B: HLA-DPA1*01:03-B1*03:01L HLA-DQA1*05:01-B1*02:01L
  source 1..13: note = Severe acute respiratory syndrome coronavirus 2
ESLRPDTRYVLMD

SEQ ID NO: 20846 - protein, 13 aa, Severe acute respiratory syndrome-related coronavirus
  REGION 1..13: note = Table B: HLA-DPA1*01:03-B1*03:01L
  source 1..13: note = Severe acute respiratory syndrome coronavirus 2
FPNTYLEGSVRVV

SEQ ID NO: 20847 - protein, 16 aa, Severe acute respiratory syndrome-related coronavirus
  REGION 1..16: note = Table B: HLA-DPA1*01:03-B1*03:01L
  source 1..16: note = Severe acute respiratory syndrome coronavirus 2
ERSEAGVCVSTSGRWV

SEQ ID NO: 20848 - protein, 12 aa, Severe acute respiratory syndrome-related coronavirus
  REGION 1..12: note = Table B: HLA-DPA1*01:03-B1*03:01L
  source 1..12: note = Severe acute respiratory syndrome coronavirus 2
GVDAVNLLTNMF

SEQ ID NO: 20849 - protein, 16 aa, Severe acute respiratory syndrome-related coronavirus
  REGION 1..16: note = Table B: HLA-DPA1*01:03-B1*03:01L HLA-DRB1*14:01L HLA-DQA1*05:05-B1*03:19L HLA-DPA1*03:01-B1*105:01L HLA-DRB1*15:03L
  source 1..16: note = Severe acute respiratory syndrome coronavirus 2
QPIGALDISASIVAGG

SEQ ID NO: 20850 - protein, 16 aa, Severe acute respiratory syndrome-related coronavirus
  REGION 1..16: note = Table B: HLA-DPA1*01:03-B1*03:01L HLA-DPA1*01:03-B1*104:01L
  source 1..16: note = Severe acute respiratory syndrome coronavirus 2
RFRRAFGEYSHVVAFN

SEQ ID NO: 20851 - protein, 16 aa, Severe acute respiratory syndrome-related coronavirus
  REGION 1..16: note = Table B: HLA-DPA1*01:03-B1*03:01L HLA-DQA1*05:05-B1*03:19L HLA-DRB1*04:08L
  source 1..16: note = Severe acute respiratory syndrome coronavirus 2
SFTVLCLTPVYSFLPG

SEQ ID NO: 20852 - protein, 15 aa, Severe acute respiratory syndrome-related coronavirus
  REGION 1..15: note = Table B: HLA-DPA1*01:03-B1*03:01L
  source 1..15: note = Severe acute respiratory syndrome coronavirus 2
AHIQWMVMFTPLVPF

SEQ ID NO: 20853 - protein, 14 aa, Severe acute respiratory syndrome-related coronavirus
  REGION 1..14: note = Table B: HLA-DPA1*01:03-B1*03:01L HLA-DPA1*01:03-B1*04:02L HLA-DPA1*03:01-B1*105:01L HLA-DPA1*01:03-B1*104:01L
  source 1..14: note = Severe acute respiratory syndrome coronavirus 2
ISTKHFYWFFSNYL

SEQ ID NO: 20854 - protein, 15 aa, Severe acute respiratory syndrome-related coronavirus
  REGION 1..15: note = Table B: HLA-DPA1*01:03-B1*03:01L
  source 1..15: note = Severe acute respiratory syndrome coronavirus 2
AKALNDFSNSGSDVL

SEQ ID NO: 20855 - protein, 15 aa, Severe acute respiratory syndrome-related coronavirus
  REGION 1..15: note = Table B: HLA-DPA1*01:03-B1*03:01L HLA-DPA1*01:03-B1*104:01L HLA-DRB1*07:01L
  source 1..15: note = Severe acute respiratory syndrome coronavirus 2
SGFRKMAFPSGKVEG

SEQ ID NO: 20856 - protein, 13 aa, Severe acute respiratory syndrome-related coronavirus
  REGION 1..13: note = Table B: HLA-DPA1*01:03-B1*03:01L HLA-DQA1*05:05-B1*03:19L HLA-DPA1*01:03-B1*04:01L HLA-DPA1*01:03-B1*04:02L HLA-DQA1*05:05-B1*03:01L
  source 1..13: note = Severe acute respiratory syndrome coronavirus 2
SEDMLNPNYEDLL

SEQ ID NO: 20857 - protein, 14 aa, Severe acute respiratory syndrome-related coronavirus
  REGION 1..14: note = Table B: HLA-DPA1*01:03-B1*03:01L HLA-DPA1*01:03-B1*04:02L
  source 1..14: note = Severe acute respiratory syndrome coronavirus 2
EDMLNPNYEDLLIR

SEQ ID NO: 20858 - protein, 15 aa, Severe acute respiratory syndrome-related coronavirus
  REGION 1..15: note = Table B: HLA-DPA1*01:03-B1*03:01L HLA-DRB1*03:01L HLA-DRB1*11:02L HLA-DRB1*11:03L HLA-DRB1*14:02L HLA-DRB1*11:01L
  source 1..15: note = Severe acute respiratory syndrome coronavirus 2
EDLLIRKSNHNFLVQ

SEQ ID NO: 20859 - protein, 15 aa, Severe acute respiratory syndrome-related coronavirus
  REGION 1..15: note = Table B: HLA-DPA1*01:03-B1*03:01L
  source 1..15: note = Severe acute respiratory syndrome coronavirus 2
LLIRKSNHNFLVQAG

SEQ ID NO: 20860 - protein, 12 aa, Severe acute respiratory syndrome-related coronavirus
  REGION 1..12: note = Table B: HLA-DPA1*01:03-B1*03:01L
  source 1..12: note = Severe acute respiratory syndrome coronavirus 2
NFLVQAGNVQLR

SEQ ID NO: 20861 - protein, 14 aa, Severe acute respiratory syndrome-related coronavirus
  REGION 1..14: note = Table B: HLA-DPA1*01:03-B1*03:01L
  source 1..14: note = Severe acute respiratory syndrome coronavirus 2
FLVQAGNVQLRVIG

SEQ ID NO: 20862 - protein, 13 aa, Severe acute respiratory syndrome-related coronavirus
  REGION 1..13: note = Table B: HLA-DPA1*01:03-B1*03:01L HLA-DRB1*14:02L HLA-DRB1*04:08L
  source 1..13: note = Severe acute respiratory syndrome coronavirus 2
LKLKVDTANPKTP

SEQ ID NO: 20863 - protein, 11 aa, Severe acute respiratory syndrome-related coronavirus
  REGION 1..11: note = Table B: HLA-DPA1*01:03-B1*03:01L HLA-DQA1*01-B1*05L HLA-DRB1*12:01L HLA-DQA1*05:05-B1*03:01L
  source 1..11: note = Severe acute respiratory syndrome coronavirus 2
RIQPGQTFSVL

SEQ ID NO: 20864 - protein, 14 aa, Severe acute respiratory syndrome-related coronavirus
  REGION 1..14: note = Table B: HLA-DPA1*01:03-B1*03:01L HLA-DPA1*02:01-B1*13:01L
  source 1..14: note = Severe acute respiratory syndrome coronavirus 2
QPGQTFSVLACYNG

SEQ ID NO: 20865 - protein, 14 aa, Severe acute respiratory syndrome-related coronavirus
  REGION 1..14: note = Table B: HLA-DPA1*01:03-B1*03:01L HLA-DPA1*03:01-B1*04:02L HLA-DRB1*14:01L HLA-DPA1*02:01-B1*13:01L HLA-DRB1*15:03L
  source 1..14: note = Severe acute respiratory syndrome coronavirus 2
SPSGVYQCAMRPNF

SEQ ID NO: 20866 - protein, 14 aa, Severe acute respiratory syndrome-related coronavirus
  REGION 1..14: note = Table B: HLA-DPA1*01:03-B1*03:01L
  source 1..14: note = Severe acute respiratory syndrome coronavirus 2
LVAMKYNYEPLTQD

SEQ ID NO: 20867 - protein, 14 aa, Severe acute respiratory syndrome-related coronavirus
  REGION 1..14: note = Table B: HLA-DPA1*01:03-B1*03:01L HLA-DPA1*03:01-B1*105:01L
  source 1..14: note = Severe acute respiratory syndrome coronavirus 2
ILGPLSAQTGIAVL

SEQ ID NO: 20868 - protein, 16 aa, Severe acute respiratory syndrome-related coronavirus
  REGION 1..16: note = Table B: HLA-DPA1*01:03-B1*03:01L HLA-DRB1*03:01L HLA-DQA1*05:01-B1*02:01L HLA-DRB1*16:01L HLA-DRB1*04:08L
  source 1..16: note = Severe acute respiratory syndrome coronavirus 2
LKELLQNGMNGRTILG

SEQ ID NO: 20869 - protein, 16 aa, Severe acute respiratory syndrome-related coronavirus
  REGION 1..16: note = Table B: HLA-DPA1*01:03-B1*03:01L HLA-DPA1*01:03-B1*04:02L
  source 1..16: note = Severe acute respiratory syndrome coronavirus 2
MSAFAMMFVKHKHAFL

SEQ ID NO: 20870 - protein, 14 aa, Severe acute respiratory syndrome-related coronavirus
  REGION 1..14: note = Table B: HLA-DPA1*01:03-B1*03:01L HLA-DQA1*05:05-B1*03:19L HLA-DQA1*05:05-B1*03:01L HLA-DQA1*02:01-B1*03:03L
  source 1..14: note = Severe acute respiratory syndrome coronavirus 2
FKLKDCVMYASAVV

SEQ ID NO: 20871 - protein, 13 aa, Severe acute respiratory syndrome-related coronavirus
  REGION 1..13: note = Table B: HLA-DPA1*01:03-B1*03:01L
  source 1..13: note = Severe acute respiratory syndrome coronavirus 2
DGARRVWTLMNVL

SEQ ID NO: 20872 - protein, 12 aa, Severe acute respiratory syndrome-related coronavirus
  REGION 1..12: note = Table B: HLA-DPA1*01:03-B1*03:01L HLA-DPA1*03:01-B1*04:02L HLA-DRB1*12:01L HLA-DPA1*03:01-B1*105:01L HLA-DRB1*15:03L
  source 1..12: note = Severe acute respiratory syndrome coronavirus 2
RYFRLTLGVYDY

SEQ ID NO: 20873 - protein, 15 aa, Severe acute respiratory syndrome-related coronavirus
  REGION 1..15: note = Table B: HLA-DPA1*01:03-B1*03:01L HLA-DPA1*01:03-B1*04:02L HLA-DPA1*02:01-B1*13:01L
  source 1..15: note = Severe acute respiratory syndrome coronavirus 2
QEFRYMNSQGLLPPK

SEQ ID NO: 20874 - protein, 15 aa, Severe acute respiratory syndrome-related coronavirus
  REGION 1..15: note = Table B: HLA-DPA1*01:03-B1*03:01L HLA-DPA1*02:01-B1*13:01L HLA-DPA1*01:03-B1*104:01L
  source 1..15: note = Severe acute respiratory syndrome coronavirus 2
YMNSQGLLPPKNSID

SEQ ID NO: 20875 - protein, 13 aa, Severe acute respiratory syndrome-related coronavirus
  REGION 1..13: note = Table B: HLA-DPA1*01:03-B1*03:01L HLA-DRB1*11:04L HLA-DQA1*05:05-B1*03:19L HLA-DQA1*05:05-B1*03:01L HLA-DRB1*10:01L
  source 1..13: note = Severe acute respiratory syndrome coronavirus 2
LSVLQQLRVESSS

SEQ ID NO: 20876 - protein, 12 aa, Severe acute respiratory syndrome-related coronavirus
  REGION 1..12: note = Table B: HLA-DPA1*01:03-B1*03:01L HLA-DPA1*03:01-B1*04:02L HLA-DPA1*01:03-B1*04:01L
  source 1..12: note = Severe acute respiratory syndrome coronavirus 2
SEFSSLPSYAAF

SEQ ID NO: 20877 - protein, 13 aa, Severe acute respiratory syndrome-related coronavirus
  REGION 1..13: note = Table B: HLA-DPA1*01:03-B1*03:01L
  source 1..13: note = Severe acute respiratory syndrome coronavirus 2
KLKKSLNVAKSEF

SEQ ID NO: 20878 - protein, 15 aa, Severe acute respiratory syndrome-related coronavirus
  REGION 1..15: note = Table B: HLA-DPA1*01:03-B1*03:01L
  source 1..15: note = Severe acute respiratory syndrome coronavirus 2
AMQRKLEKMADQAMT

SEQ ID NO: 20879 - protein, 14 aa, Severe acute respiratory syndrome-related coronavirus
  REGION 1..14: note = Table B: HLA-DPA1*01:03-B1*03:01L
  source 1..14: note = Severe acute respiratory syndrome coronavirus 2
EDKRAKVTSAMQTM

SEQ ID NO: 20880 - protein, 14 aa, Severe acute respiratory syndrome-related coronavirus
  REGION 1..14: note = Table B: HLA-DPA1*01:03-B1*03:01L
  source 1..14: note = Severe acute respiratory syndrome coronavirus 2
DKRAKVTSAMQTML

SEQ ID NO: 20881 - protein, 17 aa, Severe acute respiratory syndrome-related coronavirus
  REGION 1..17: note = Table B: HLA-DPA1*01:03-B1*03:01L
  source 1..17: note = Severe acute respiratory syndrome coronavirus 2
VTSAMQTMLFTMLRKLD

SEQ ID NO: 20882 - protein, 16 aa, Severe acute respiratory syndrome-related coronavirus
  REGION 1..16: note = Table B: HLA-DPA1*01:03-B1*03:01L HLA-DQA1*01-B1*05L
  source 1..16: note = Severe acute respiratory syndrome coronavirus 2
SAMQTMLFTMLRKLDN

SEQ ID NO: 20883 - protein, 16 aa, Severe acute respiratory syndrome-related coronavirus
  REGION 1..16: note = Table B: HLA-DPA1*01:03-B1*03:01L
  source 1..16: note = Severe acute respiratory syndrome coronavirus 2
MQTMLFTMLRKLDNDA

SEQ ID NO: 20884 - protein, 14 aa, Severe acute respiratory syndrome-related coronavirus
  REGION 1..14: note = Table B: HLA-DPA1*01:03-B1*03:01L HLA-DPA1*02:01-B1*13:01L
  source 1..14: note = Severe acute respiratory syndrome coronavirus 2
NNARDGCVPLNIIP

SEQ ID NO: 20885 - protein, 14 aa, Severe acute respiratory syndrome-related coronavirus
  REGION 1..14: note = Table B: HLA-DPA1*01:03-B1*03:01L HLA-DPA1*02:01-B1*13:01L HLA-DPA1*01:03-B1*104:01L HLA-DQA1*01:03-B1*06:01L
  source 1..14: note = Severe acute respiratory syndrome coronavirus 2
NARDGCVPLNIIPL

SEQ ID NO: 20886 - protein, 13 aa, Severe acute respiratory syndrome-related coronavirus
  REGION 1..13: note = Table B: HLA-DPA1*01:03-B1*03:01L HLA-DRB1*12:01L HLA-DRB1*15:03L
  source 1..13: note = Severe acute respiratory syndrome coronavirus 2
TTAAKLMVVIPDY

SEQ ID NO: 20887 - protein, 15 aa, Severe acute respiratory syndrome-related coronavirus
  REGION 1..15: note = Table B: HLA-DPA1*01:03-B1*03:01L
  source 1..15: note = Severe acute respiratory syndrome coronavirus 2
ASALWEIQQVVDADS

SEQ ID NO: 20888 - protein, 12 aa, Severe acute respiratory syndrome-related coronavirus
  REGION 1..12: note = Table B: HLA-DPA1*01:03-B1*03:01L HLA-DQA1*05:05-B1*03:19L HLA-DRB1*09:01L HLA-DRB1*07:01L HLA-DRB1*04:08L
  source 1..12: note = Severe acute respiratory syndrome coronavirus 2
KIVQLSEISMDN

SEQ ID NO: 20889 - protein, 13 aa, Severe acute respiratory syndrome-related coronavirus
  REGION 1..13: note = Table B: HLA-DPA1*01:03-B1*03:01L HLA-DQA1*05:01-B1*02:01L HLA-DPA1*03:01-B1*105:01L
  source 1..13: note = Severe acute respiratory syndrome coronavirus 2
DNSPNLAWPLIVT

SEQ ID NO: 20890 - protein, 14 aa, Severe acute respiratory syndrome-related coronavirus
  REGION 1..14: note = Table B: HLA-DPA1*01:03-B1*03:01L
  source 1..14: note = Severe acute respiratory syndrome coronavirus 2
AWPLIVTALRANSA

SEQ ID NO: 20891 - protein, 13 aa, Severe acute respiratory syndrome-related coronavirus
  REGION 1..13: note = Table B: HLA-DPA1*01:03-B1*03:01L HLA-DPA1*03:01-B1*04:02L HLA-DRB1*11:04L HLA-DRB1*11:01L HLA-DQA1*05:05-B1*03:19L HLA-DQA1*05:01-B1*02:01L HLA-DRB1*09:01L HLA-DPA1*03:01-B1*105:01L HLA-DPA1*01:02-B1*04:01L
  source 1..13: note = Severe acute respiratory syndrome coronavirus 2
VTALRANSAVKLQ

SEQ ID NO: 20892 - protein, 12 aa, Severe acute respiratory syndrome-related coronavirus
  REGION 1..12: note = Table B: HLA-DPA1*01:03-B1*03:01L HLA-DRB1*12:02L
  source 1..12: note = Severe acute respiratory syndrome coronavirus 2
AVKLQNNELSPV

SEQ ID NO: 20893 - protein, 10 aa, Severe acute respiratory syndrome-related coronavirus
  REGION 1..10: note = Table B: HLA-DPA1*01:03-B1*03:01L HLA-DRB1*11:02L HLA-DQA1*05:05-B1*03:19M HLA-DQA1*05:01-B1*02:01L HLA-DPA1*01:03-B1*104:01L HLA-DRB1*16:01L
  source 1..10: note = Severe acute respiratory syndrome coronavirus 2
CTDDNALAYY

SEQ ID NO: 20894 - protein, 15 aa, Severe acute respiratory syndrome-related coronavirus
  REGION 1..15: note = Table B: HLA-DPA1*01:03-B1*03:01L HLA-DRB4*01:01L HLA-DRB3*01:01L HLA-DPA1*01:03-B1*02:01L HLA-DPA1*01:03-B1*104:01L HLA-DQA1*05:05-B1*03:01L
  source 1..15: note = Severe acute respiratory syndrome coronavirus 2
GRFVLALLSDLQDLK

SEQ ID NO: 20895 - protein, 10 aa, Severe acute respiratory syndrome-related coronavirus
  REGION 1..10: note = Table B: HLA-DPA1*01:03-B1*03:01L HLA-DQA1*01-B1*05L HLA-DQA1*05:05-B1*03:19L HLA-DQA1*05:01-B1*02:01L HLA-DPA1*01:03-B1*104:01L HLA-DRB1*16:01L
  source 1..10: note = Severe acute respiratory syndrome coronavirus 2
YTELEPPCRF

SEQ ID NO: 20896 - protein, 14 aa, Severe acute respiratory syndrome-related coronavirus
  REGION 1..14: note = Table B: HLA-DPA1*01:03-B1*03:01L
  source 1..14: note = Severe acute respiratory syndrome coronavirus 2
LAATVRLQAGNATE

SEQ ID NO: 20897 - protein, 15 aa, Severe acute respiratory syndrome-related coronavirus
  REGION 1..15: note = Table B: HLA-DPA1*01:03-B1*03:01L
  source 1..15: note = Severe acute respiratory syndrome coronavirus 2
LQAGNATEVPANSTV

SEQ ID NO: 20898 - protein, 14 aa, Severe acute respiratory syndrome-related coronavirus
  REGION 1..14: note = Table B: HLA-DPA1*01:03-B1*03:01L HLA-DRB1*12:01L
  source 1..14: note = Severe acute respiratory syndrome coronavirus 2
TVLSFCAFAVDAAK

SEQ ID NO: 20899 - protein, 14 aa, Severe acute respiratory syndrome-related coronavirus
  REGION 1..14: note = Table B: HLA-DPA1*01:03-B1*03:01L HLA-DRB1*08:01L HLA-DRB1*11:01L HLA-DPA1*01:03-B1*04:02L HLA-DRB1*12:01L
  source 1..14: note = Severe acute respiratory syndrome coronavirus 2
THTGTGQAITVTPE

SEQ ID NO: 20900 - protein, 14 aa, Severe acute respiratory syndrome-related coronavirus
  REGION 1..14: note = Table B: HLA-DPA1*01:03-B1*03:01L
  source 1..14: note = Severe acute respiratory syndrome coronavirus 2
TVTPEANMDQESFG

SEQ ID NO: 20901 - protein, 14 aa, Severe acute respiratory syndrome-related coronavirus
  REGION 1..14: note = Table B: HLA-DPA1*01:03-B1*03:01L
  source 1..14: note = Severe acute respiratory syndrome coronavirus 2
VTPEANMDQESFGG

SEQ ID NO: 20902 - protein, 14 aa, Severe acute respiratory syndrome-related coronavirus
  REGION 1..14: note = Table B: HLA-DPA1*01:03-B1*03:01L
  source 1..14: note = Severe acute respiratory syndrome coronavirus 2
VVYRAFDIYNDKVA

SEQ ID NO: 20903 - protein, 15 aa, Severe acute respiratory syndrome-related coronavirus
  REGION 1..15: note = Table B: HLA-DPA1*01:03-B1*03:01L HLA-DRB1*11:03L HLA-DRB1*13:01L HLA-DRB1*07:01L HLA-DRB1*08:03L HLA-DRB1*15:01L
  source 1..15: note = Severe acute respiratory syndrome coronavirus 2
DDNLIDSYFVVKRHT

SEQ ID NO: 20904 - protein, 15 aa, Severe acute respiratory syndrome-related coronavirus
  REGION 1..15: note = Table B: HLA-DPA1*01:03-B1*03:01L
  source 1..15: note = Severe acute respiratory syndrome coronavirus 2
DNLIDSYFVVKRHTF

SEQ ID NO: 20905 - protein, 15 aa, Severe acute respiratory syndrome-related coronavirus
  REGION 1..15: note = Table B: HLA-DPA1*01:03-B1*03:01L HLA-DPA1*01:03-B1*02:01L
  source 1..15: note = Severe acute respiratory syndrome coronavirus 2
DSYFVVKRHTFSNYQ

SEQ ID NO: 20906 - protein, 16 aa, Severe acute respiratory syndrome-related coronavirus
  REGION 1..16: note = Table B: HLA-DPA1*01:03-B1*03:01L HLA-DPA1*03:01-B1*04:02L HLA-DRB1*11:01L HLA-DPA1*01:03-B1*04:02L HLA-DPA1*01:03-B1*02:01L
  source 1..16: note = Severe acute respiratory syndrome coronavirus 2
YFVVKRHTFSNYQHEE

SEQ ID NO: 20907 - protein, 15 aa, Severe acute respiratory syndrome-related coronavirus
  REGION 1..15: note = Table B: HLA-DPA1*01:03-B1*03:01L
  source 1..15: note = Severe acute respiratory syndrome coronavirus 2
IYNLLKDCPAVAKHD

SEQ ID NO: 20908 - protein, 14 aa, Severe acute respiratory syndrome-related coronavirus
  REGION 1..14: note = Table B: HLA-DPA1*01:03-B1*03:01L
  source 1..14: note = Severe acute respiratory syndrome coronavirus 2
NLLKDCPAVAKHDF

SEQ ID NO: 20909 - protein, 15 aa, Severe acute respiratory syndrome-related coronavirus
  REGION 1..15: note = Table B: HLA-DPA1*01:03-B1*03:01L
  source 1..15: note = Severe acute respiratory syndrome coronavirus 2
SRQRLTKYTMADLVY

SEQ ID NO: 20910 - protein, 10 aa, Severe acute respiratory syndrome-related coronavirus
  REGION 1..10: note = Table B: HLA-DPA1*01:03-B1*03:01L HLA-DQA1*05:05-B1*03:19L HLA-DQA1*05:01-B1*02:01L HLA-DPA1*01:03-B1*104:01L HLA-DRB1*16:01L
  source 1..10: note = Severe acute respiratory syndrome coronavirus 2
DDYFNKKDWY

SEQ ID NO: 20911 - protein, 15 aa, Severe acute respiratory syndrome-related coronavirus
  REGION 1..15: note = Table B: HLA-DPA1*01:03-B1*03:01L
  source 1..15: note = Severe acute respiratory syndrome coronavirus 2
QALLKTVQFCDAMRN

SEQ ID NO: 20912 - protein, 13 aa, Severe acute respiratory syndrome-related coronavirus
  REGION 1..13: note = Table B: HLA-DPA1*01:03-B1*03:01L HLA-DRB1*04:08L
  source 1..13: note = Severe acute respiratory syndrome coronavirus 2
DAMRNAGIVGVLT

SEQ ID NO: 20913 - protein, 11 aa, Severe acute respiratory syndrome-related coronavirus
  REGION 1..11: note = Table B: HLA-DPA1*01:03-B1*03:01L HLA-DPA1*01:03-B1*104:01L HLA-DRB1*16:01L
  source 1..11: note = Severe acute respiratory syndrome coronavirus 2
LDNQDLNGNWY

SEQ ID NO: 20914 - protein, 13 aa, Severe acute respiratory syndrome-related coronavirus
  REGION 1..13: note = Table B: HLA-DPA1*01:03-B1*03:01L HLA-DRB1*11:04L HLA-DRB1*14:02L HLA-DRB1*09:01L HLA-DRB1*12:02L HLA-DPA1*01:02-B1*04:01L HLA-DRB1*10:01L HLA-DRB1*04:08L
  source 1..13: note = Severe acute respiratory syndrome coronavirus 2
GDFIQTTPGSGVP

SEQ ID NO: 20915 - protein, 14 aa, Severe acute respiratory syndrome-related coronavirus
  REGION 1..14: note = Table B: HLA-DPA1*01:03-B1*03:01L
  source 1..14: note = Severe acute respiratory syndrome coronavirus 2
DFIQTTPGSGVPVV

SEQ ID NO: 20916 - protein, 15 aa, Severe acute respiratory syndrome-related coronavirus
  REGION 1..15: note = Table B: HLA-DPA1*01:03-B1*03:01L HLA-DQA1*05:01-B1*02:01L HLA-DPA1*01:03-B1*04:02L HLA-DQA1*05:05-B1*03:01L HLA-DPA1*01:02-B1*04:01L
  source 1..15: note = Severe acute respiratory syndrome coronavirus 2
VPVVDSYYSLLMPIL

SEQ ID NO: 20917 - protein, 16 aa, Severe acute respiratory syndrome-related coronavirus
  REGION 1..16: note = Table B: HLA-DPA1*01:03-B1*03:01L HLA-DRB1*11:02L HLA-DRB1*11:03L HLA-DRB1*11:04L HLA-DRB1*08:02L HLA-DRB1*08:03L
  source 1..16: note = Severe acute respiratory syndrome coronavirus 2
EERLKLFDRYFKYWDQ

SEQ ID NO: 20918 - protein, 16 aa, Severe acute respiratory syndrome-related coronavirus
  REGION 1..16: note = Table B: HLA-DPA1*01:03-B1*03:01L HLA-DRB1*11:02L HLA-DQA1*05:05-B1*03:19L
  source 1..16: note = Severe acute respiratory syndrome coronavirus 2
ERLKLFDRYFKYWDQT

SEQ ID NO: 20919 - protein, 14 aa, Severe acute respiratory syndrome-related coronavirus
  REGION 1..14: note = Table B: HLA-DPA1*01:03-B1*03:01L
  source 1..14: note = Severe acute respiratory syndrome coronavirus 2
FNVLFSTVFPPTSF

SEQ ID NO: 20920 - protein, 16 aa, Severe acute respiratory syndrome-related coronavirus
  REGION 1..16: note = Table B: HLA-DPA1*01:03-B1*03:01L HLA-DPA1*02:01-B1*13:01L
  source 1..16: note = Severe acute respiratory syndrome coronavirus 2
KRTTCFSVAALTNNVA

SEQ ID NO: 20921 - protein, 15 aa, Severe acute respiratory syndrome-related coronavirus
  REGION 1..15: note = Table B: HLA-DPA1*01:03-B1*03:01L HLA-DRB1*11:03L HLA-DRB1*11:04L HLA-DRB1*14:02L
  source 1..15: note = Severe acute respiratory syndrome coronavirus 2
AALTNNVAFQTVKPG

SEQ ID NO: 20922 - protein, 12 aa, Severe acute respiratory syndrome-related coronavirus
  REGION 1..12: note = Table B: HLA-DPA1*01:03-B1*03:01L HLA-DQA1*05:05-B1*03:19L HLA-DQA1*05:01-B1*02:01L HLA-DPA1*01:03-B1*104:01L
  source 1..12: note = Severe acute respiratory syndrome coronavirus 2
TVKPGNFNKDFY

SEQ ID NO: 20923 - protein, 11 aa, Severe acute respiratory syndrome-related coronavirus
  REGION 1..11: note = Table B: HLA-DPA1*01:03-B1*03:01L HLA-DQA1*05:05-B1*03:01L
  source 1..11: note = Severe acute respiratory syndrome coronavirus 2
FYDFAVSKGFF

SEQ ID NO: 20924 - protein, 18 aa, Severe acute respiratory syndrome-related coronavirus
  REGION 1..18: note = Table B: HLA-DPA1*01:03-B1*03:01L
  source 1..18: note = Severe acute respiratory syndrome coronavirus 2
VSKGFFKEGSSVELKHFF

SEQ ID NO: 20925 - protein, 15 aa, Severe acute respiratory syndrome-related coronavirus
  REGION 1..15: note = Table B: HLA-DPA1*01:03-B1*03:01L HLA-DQA1*01:01-B1*05:01L
  source 1..15: note = Severe acute respiratory syndrome coronavirus 2
VELKHFFFAQDGNAA

SEQ ID NO: 20926 - protein, 11 aa, Severe acute respiratory syndrome-related coronavirus
  REGION 1..11: note = Table B: HLA-DPA1*01:03-B1*03:01L HLA-DRB1*16:01L
  source 1..11: note = Severe acute respiratory syndrome coronavirus 2
DGNAAISDYDY

SEQ ID NO: 20927 - protein, 14 aa, Severe acute respiratory syndrome-related coronavirus
  REGION 1..14: note = Table B: HLA-DPA1*01:03-B1*03:01L HLA-DPA1*03:01-B1*04:02L HLA-DQA1*05:01-B1*02:01L HLA-DPA1*01:03-B1*104:01L HLA-DPA1*01:02-B1*04:01L HLA-DQA1*02:01-B1*03:03L
  source 1..14: note = Severe acute respiratory syndrome coronavirus 2
DIRQLLFVVEVVDK

SEQ ID NO: 20928 - protein, 15 aa, Severe acute respiratory syndrome-related coronavirus
  REGION 1..15: note = Table B: HLA-DPA1*01:03-B1*03:01L HLA-DRB1*11:02L HLA-DRB1*14:02L HLA-DPA1*01:03-B1*04:02L HLA-DPA1*02:01-B1*13:01L HLA-DRB1*08:02L HLA-DRB1*08:03L
  source 1..15: note = Severe acute respiratory syndrome coronavirus 2
FPFNKWGKARLYYDS

SEQ ID NO: 20929 - protein, 16 aa, Severe acute respiratory syndrome-related coronavirus
  REGION 1..16: note = Table B: HLA-DPA1*01:03-B1*03:01L HLA-DPA1*03:01-B1*105:01L
  source 1..16: note = Severe acute respiratory syndrome coronavirus 2
LKYAISAKNRARTVAG

SEQ ID NO: 20930 - protein, 15 aa, Severe acute respiratory syndrome-related coronavirus
  REGION 1..15: note = Table B: HLA-DPA1*01:03-B1*03:01L
  source 1..15: note = Severe acute respiratory syndrome coronavirus 2
RARTVAGVSICSTMT

SEQ ID NO: 20931 - protein, 16 aa, Severe acute respiratory syndrome-related coronavirus
  REGION 1..16: note = Table B: HLA-DPA1*01:03-B1*03:01L
  source 1..16: note = Severe acute respiratory syndrome coronavirus 2
LARKHTTCCSLSHRFY

SEQ ID NO: 20932 - protein, 14 aa, Severe acute respiratory syndrome-related coronavirus
  REGION 1..14: note = Table B: HLA-DPA1*01:03-B1*03:01L HLA-DRB1*14:02L
  source 1..14: note = Severe acute respiratory syndrome coronavirus 2
DFVNEFYAYLRKHF

SEQ ID NO: 20933 - protein, 14 aa, Severe acute respiratory syndrome-related coronavirus
  REGION 1..14: note = Table B: HLA-DPA1*01:03-B1*03:01L HLA-DRB1*11:02L
  source 1..14: note = Severe acute respiratory syndrome coronavirus 2
FVNEFYAYLRKHFS

SEQ ID NO: 20934 - protein, 11 aa, Severe acute respiratory syndrome-related coronavirus
  REGION 1..11: note = Table B: HLA-DPA1*01:03-B1*03:01L HLA-DQA1*01:01-B1*05:01L HLA-DRB1*11:01L HLA-DRB4*01:01L HLA-DPA1*01:03-B1*04:02L
  source 1..11: note = Severe acute respiratory syndrome coronavirus 2
VYLPYPDPSRI

SEQ ID NO: 20935 - protein, 12 aa, Severe acute respiratory syndrome-related coronavirus
  REGION 1..12: note = Table B: HLA-DPA1*01:03-B1*03:01L HLA-DPA1*03:01-B1*04:02L HLA-DQA1*01-B1*05L HLA-DPA1*03:01-B1*105:01L HLA-DRB1*15:03L
  source 1..12: note = Severe acute respiratory syndrome coronavirus 2
ERFVSLAIDAYP

SEQ ID NO: 20936 - protein, 16 aa, Severe acute respiratory syndrome-related coronavirus
  REGION 1..16: note = Table B: HLA-DPA1*01:03-B1*03:01L HLA-DRB1*14:02L HLA-DPA1*01:03-B1*04:01L HLA-DPA1*01:03-B1*104:01L HLA-DQA1*05:05-B1*03:01L HLA-DRB1*07:01L
  source 1..16: note = Severe acute respiratory syndrome coronavirus 2
DVFHLYLQYIRKLHDE

SEQ ID NO: 20937 - protein, 12 aa, Severe acute respiratory syndrome-related coronavirus
  REGION 1..12: note = Table B: HLA-DPA1*01:03-B1*03:01L
  source 1..12: note = Severe acute respiratory syndrome coronavirus 2
FYEAMYTPHTVL

SEQ ID NO: 20938 - protein, 12 aa, Severe acute respiratory syndrome-related coronavirus
  REGION 1..12: note = Table B: HLA-DPA1*01:03-B1*03:01L HLA-DRB1*04:10L
  source 1..12: note = Severe acute respiratory syndrome coronavirus 2
YEAMYTPHTVLQ

SEQ ID NO: 20939 - protein, 15 aa, Severe acute respiratory syndrome-related coronavirus
  REGION 1..15: note = Table B: HLA-DPA1*01:03-B1*03:01L HLA-DPA1*03:01-B1*04:02L HLA-DRB1*03:01L HLA-DRB1*11:02L HLA-DRB1*14:02L HLA-DQA1*05:05-B1*03:19L HLA-DRB1*13:01L HLA-DPA1*03:01-B1*105:01L HLA-DQA1*05:05-B1*03:01L
  REGION 1..15: note = CONT. FROM ABOVE: HLA-DQA1*01:03-B1*06:01L HLA-DRB1*08:02L
  source 1..15: note = Severe acute respiratory syndrome coronavirus 2
DHVISTSHKLVLSVN

SEQ ID NO: 20940 - protein, 12 aa, Severe acute respiratory syndrome-related coronavirus
  REGION 1..12: note = Table B: HLA-DPA1*01:03-B1*03:01L HLA-DQA1*01-B1*05L HLA-DQA1*05:05-B1*03:19L
  source 1..12: note = Severe acute respiratory syndrome coronavirus 2
VTDVTQLYLGGM

SEQ ID NO: 20941 - protein, 13 aa, Severe acute respiratory syndrome-related coronavirus
  REGION 1..13: note = Table B: HLA-DPA1*01:03-B1*03:01L HLA-DQA1*05:05-B1*03:19L HLA-DRB1*12:02L HLA-DRB1*08:02L
  source 1..13: note = Severe acute respiratory syndrome coronavirus 2
FGLYKNTCVGSDN

SEQ ID NO: 20942 - protein, 16 aa, Severe acute respiratory syndrome-related coronavirus
  REGION 1..16: note = Table B: HLA-DPA1*01:03-B1*03:01L HLA-DPA1*02:01-B1*13:01L
  source 1..16: note = Severe acute respiratory syndrome coronavirus 2
DNVTDFNAIATCDWTN

SEQ ID NO: 20943 - protein, 16 aa, Severe acute respiratory syndrome-related coronavirus
  REGION 1..16: note = Table B: HLA-DPA1*01:03-B1*03:01L HLA-DRB1*15:03L
  source 1..16: note = Severe acute respiratory syndrome coronavirus 2
DFNAIATCDWTNAGDY

SEQ ID NO: 20944 - protein, 13 aa, Severe acute respiratory syndrome-related coronavirus
  REGION 1..13: note = Table B: HLA-DPA1*01:03-B1*03:01L HLA-DRB1*14:17L
  source 1..13: note = Severe acute respiratory syndrome coronavirus 2
SYGIATVREVLSD

SEQ ID NO: 20945 - protein, 10 aa, Severe acute respiratory syndrome-related coronavirus
  REGION 1..10: note = Table B: HLA-DPA1*01:03-B1*03:01L HLA-DRB1*03:01L HLA-DQA1*05:05-B1*03:19M HLA-DQA1*05:01-B1*02:01L HLA-DPA1*01:03-B1*104:01L HLA-DRB1*16:01L
  source 1..10: note = Severe acute respiratory syndrome coronavirus 2
LSDRELHLSW

SEQ ID NO: 20946 - protein, 18 aa, Severe acute respiratory syndrome-related coronavirus
  REGION 1..18: note = Table B: HLA-DPA1*01:03-B1*03:01L
  source 1..18: note = Severe acute respiratory syndrome coronavirus 2
RPPLNRNYVFTGYRVTKN

SEQ ID NO: 20947 - protein, 19 aa, Severe acute respiratory syndrome-related coronavirus
  REGION 1..19: note = Table B: HLA-DPA1*01:03-B1*03:01L HLA-DRB1*14:02L HLA-DPA1*01:03-B1*104:01L
  source 1..19: note = Severe acute respiratory syndrome coronavirus 2
PPLNRNYVFTGYRVTKNSK

SEQ ID NO: 20948 - protein, 14 aa, Severe acute respiratory syndrome-related coronavirus
  REGION 1..14: note = Table B: HLA-DPA1*01:03-B1*03:01L
  source 1..14: note = Severe acute respiratory syndrome coronavirus 2
GYRVTKNSKVQIGE

SEQ ID NO: 20949 - protein, 10 aa, Severe acute respiratory syndrome-related coronavirus
  REGION 1..10: note = Table B: HLA-DPA1*01:03-B1*03:01L HLA-DQA1*01-B1*05L HLA-DQA1*05:05-B1*03:19L HLA-DQA1*05:01-B1*02:01L HLA-DPA1*01:03-B1*104:01L HLA-DRB1*16:01L
  source 1..10: note = Severe acute respiratory syndrome coronavirus 2
KGDYGDAVVY

SEQ ID NO: 20950 - protein, 14 aa, Severe acute respiratory syndrome-related coronavirus
  REGION 1..14: note = Table B: HLA-DPA1*01:03-B1*03:01L HLA-DQA1*05:05-B1*03:19L HLA-DRB1*16:01L
  source 1..14: note = Severe acute respiratory syndrome coronavirus 2
FVLTSHTVMPLSAP

SEQ ID NO: 20951 - protein, 14 aa, Severe acute respiratory syndrome-related coronavirus
  REGION 1..14: note = Table B: HLA-DPA1*01:03-B1*03:01L HLA-DRB1*04:10L HLA-DPA1*02:01-B1*13:01L HLA-DRB1*04:08L
  source 1..14: note = Severe acute respiratory syndrome coronavirus 2
VMPLSAPTLVPQEH

SEQ ID NO: 20952 - protein, 11 aa, Severe acute respiratory syndrome-related coronavirus
  REGION 1..11: note = Table B: HLA-DPA1*01:03-B1*03:01L HLA-DQA1*01:01-B1*05:01L HLA-DRB1*13:01L HLA-DRB1*04:10L HLA-DRB1*07:01L HLA-DRB1*15:03L
  source 1..11: note = Severe acute respiratory syndrome coronavirus 2
EFSSNVANYQK

SEQ ID NO: 20953 - protein, 14 aa, Severe acute respiratory syndrome-related coronavirus
  REGION 1..14: note = Table B: HLA-DPA1*01:03-B1*03:01L HLA-DQA1*05:05-B1*03:19L HLA-DPA1*02:01-B1*13:01L HLA-DQA1*05:05-B1*03:01L HLA-DRB1*15:03L
  source 1..14: note = Severe acute respiratory syndrome coronavirus 2
VGMQKYSTLQGPPG

SEQ ID NO: 20954 - protein, 18 aa, Severe acute respiratory syndrome-related coronavirus
  REGION 1..18: note = Table B: HLA-DPA1*01:03-B1*03:01L
  source 1..18: note = Severe acute respiratory syndrome coronavirus 2
AAVDALCEKALKYLPIDK

SEQ ID NO: 20955 - protein, 16 aa, Severe acute respiratory syndrome-related coronavirus
  REGION 1..16: note = Table B: HLA-DPA1*01:03-B1*03:01L HLA-DPA1*03:01-B1*04:02L HLA-DRB1*03:01L HLA-DRB1*11:02L HLA-DRB1*14:02L HLA-DPA1*01:03-B1*04:02L
  source 1..16: note = Severe acute respiratory syndrome coronavirus 2
ALKYLPIDKCSRIIPA

SEQ ID NO: 20956 - protein, 13 aa, Severe acute respiratory syndrome-related coronavirus
  REGION 1..13: note = Table B: HLA-DPA1*01:03-B1*03:01L HLA-DRB1*12:01L HLA-DPA1*03:01-B1*105:01L HLA-DRB1*14:17L HLA-DRB1*15:03L
  source 1..13: note = Severe acute respiratory syndrome coronavirus 2
TVNALPETTADIV

SEQ ID NO: 20957 - protein, 17 aa, Severe acute respiratory syndrome-related coronavirus
  REGION 1..17: note = Table B: HLA-DPA1*01:03-B1*03:01L HLA-DQA1*01:03-B1*06:01L
  source 1..17: note = Severe acute respiratory syndrome coronavirus 2
VNARLRAKHYVYIGDPA

SEQ ID NO: 20958 - protein, 13 aa, Severe acute respiratory syndrome-related coronavirus
  REGION 1..13: note = Table B: HLA-DPA1*01:03-B1*03:01L HLA-DRB1*08:01L HLA-DPA1*02:01-B1*13:01L
  source 1..13: note = Severe acute respiratory syndrome coronavirus 2
EYDYVIFTQTTET

SEQ ID NO: 20959 - protein, 13 aa, Severe acute respiratory syndrome-related coronavirus
  REGION 1..13: note = Table B: HLA-DPA1*01:03-B1*03:01L
  source 1..13: note = Severe acute respiratory syndrome coronavirus 2
ITRAKVGILCIMS

SEQ ID NO: 20960 - protein, 11 aa, Severe acute respiratory syndrome-related coronavirus
  REGION 1..11: note = Table B: HLA-DPA1*01:03-B1*03:01L HLA-DRB1*14:01L HLA-DPA1*01:03-B1*04:01L HLA-DPA1*01:03-B1*04:02L
  source 1..11: note = Severe acute respiratory syndrome coronavirus 2
DLYDKLQFTSL

SEQ ID NO: 20961 - protein, 12 aa, Severe acute respiratory syndrome-related coronavirus
  REGION 1..12: note = Table B: HLA-DPA1*01:03-B1*03:01L
  source 1..12: note = Severe acute respiratory syndrome coronavirus 2
ATLQAENVTGLF

SEQ ID NO: 20962 - protein, 16 aa, Severe acute respiratory syndrome-related coronavirus
  REGION 1..16: note = Table B: HLA-DPA1*01:03-B1*03:01L HLA-DPA1*03:01-B1*04:02L HLA-DRB1*11:02L HLA-DRB1*14:02L HLA-DQA1*01-B1*05L HLA-DQA1*05:05-B1*03:19L HLA-DRB4*01:01L HLA-DPA1*01:03-B1*04:02L HLA-DPA1*01:03-B1*104:01L
  REGION 1..16: note = CONT. FROM ABOVE: HLA-DQA1*05:05-B1*03:01L HLA-DQA1*01:03-B1*06: 01L HLA-DRB1*08:02L
  source 1..16: note = Severe acute respiratory syndrome coronavirus 2
DMTYRRLISMMGFKMN

SEQ ID NO: 20963 - protein, 17 aa, Severe acute respiratory syndrome-related coronavirus
  REGION 1..17: note = Table B: HLA-DPA1*01:03-B1*03:01L HLA-DQA1*05:05-B1*03:19L HLA-DQA1*05:01-B1*02:01L
  source 1..17: note = Severe acute respiratory syndrome coronavirus 2
TPNNTDFSRVSAKPPPG

SEQ ID NO: 20964 - protein, 12 aa, Severe acute respiratory syndrome-related coronavirus
  REGION 1..12: note = Table B: HLA-DPA1*01:03-B1*03:01L HLA-DPA1*01:03-B1*04:01L
  source 1..12: note = Severe acute respiratory syndrome coronavirus 2
IVQMLSDTLKNL

SEQ ID NO: 20965 - protein, 13 aa, Severe acute respiratory syndrome-related coronavirus
  REGION 1..13: note = Table B: HLA-DPA1*01:03-B1*03:01L HLA-DRB1*12:01L HLA-DRB1*04:08L
  source 1..13: note = Severe acute respiratory syndrome coronavirus 2
GFDYVYNPFMIDV

SEQ ID NO: 20966 - protein, 14 aa, Severe acute respiratory syndrome-related coronavirus
  REGION 1..14: note = Table B: HLA-DPA1*01:03-B1*03:01L HLA-DPA1*01:03-B1*04:02L
  source 1..14: note = Severe acute respiratory syndrome coronavirus 2
PFMIDVQQWGFTGN

SEQ ID NO: 20967 - protein, 13 aa, Severe acute respiratory syndrome-related coronavirus
  REGION 1..13: note = Table B: HLA-DPA1*01:03-B1*03:01L
  source 1..13: note = Severe acute respiratory syndrome coronavirus 2
WTIEYPIIGDELK

SEQ ID NO: 20968 - protein, 12 aa, Severe acute respiratory syndrome-related coronavirus
  REGION 1..12: note = Table B: HLA-DPA1*01:03-B1*03:01L HLA-DQA1*05:01-B1*02:01L HLA-DQA1*05:05-B1*03:01L HLA-DQA1*01:03-B1*06:01L HLA-DRB1*15:03L
  source 1..12: note = Severe acute respiratory syndrome coronavirus 2
FYDAQPCSDKAY

SEQ ID NO: 20969 - protein, 15 aa, Severe acute respiratory syndrome-related coronavirus
  REGION 1..15: note = Table B: HLA-DPA1*01:03-B1*03:01L HLA-DRB1*13:01L HLA-DPA1*01:03-B1*104:01L HLA-DRB1*10:01L HLA-DQA1*01:03-B1*06:01L
  source 1..15: note = Severe acute respiratory syndrome coronavirus 2
GGSLYVNKHAFHTPA

SEQ ID NO: 20970 - protein, 14 aa, Severe acute respiratory syndrome-related coronavirus
  REGION 1..14: note = Table B: HLA-DPA1*01:03-B1*03:01L HLA-DPA1*03:01-B1*04:02L HLA-DRB1*14:01L HLA-DRB1*08:01L HLA-DPA1*01:03-B1*04:02L HLA-DPA1*02:01-B1*13:01L HLA-DQA1*05:05-B1*03:01L
  source 1..14: note = Severe acute respiratory syndrome coronavirus 2
PFFYYSDSPCESHG

SEQ ID NO: 20971 - protein, 11 aa, Severe acute respiratory syndrome-related coronavirus
  REGION 1..11: note = Table B: HLA-DPA1*01:03-B1*03:01L HLA-DRB1*14:02L HLA-DPA1*02:01-B1*13:01L HLA-DQA1*02:01-B1*03:03L
  source 1..11: note = Severe acute respiratory syndrome coronavirus 2
SLWVYKQFDTY

SEQ ID NO: 20972 - protein, 14 aa, Severe acute respiratory syndrome-related coronavirus
  REGION 1..14: note = Table B: HLA-DPA1*01:03-B1*03:01L
  source 1..14: note = Severe acute respiratory syndrome coronavirus 2
VYKQFDTYNLWNTF

SEQ ID NO: 20973 - protein, 13 aa, Severe acute respiratory syndrome-related coronavirus
  REGION 1..13: note = Table B: HLA-DPA1*01:03-B1*03:01L HLA-DPA1*01:03-B1*04:01L HLA-DPA1*01:03-B1*04:02L HLA-DRB1*12:01L HLA-DRB1*04:08L HLA-DRB1*15:03L
  source 1..13: note = Severe acute respiratory syndrome coronavirus 2
VDGVDVELFENKT

SEQ ID NO: 20974 - protein, 14 aa, Severe acute respiratory syndrome-related coronavirus
  REGION 1..14: note = Table B: HLA-DPA1*01:03-B1*03:01L HLA-DPA1*02:01-B1*13:01L HLA-DQA1*05:05-B1*03:01L
  source 1..14: note = Severe acute respiratory syndrome coronavirus 2
IKPVPEVKILNNLG

SEQ ID NO: 20975 - protein, 13 aa, Severe acute respiratory syndrome-related coronavirus
  REGION 1..13: note = Table B: HLA-DPA1*01:03-B1*03:01L HLA-DPA1*02:01-B1*13:01L HLA-DPA1*03:01-B1*105:01L
  source 1..13: note = Severe acute respiratory syndrome coronavirus 2
YKRDAPAHISTIG

SEQ ID NO: 20976 - protein, 15 aa, Severe acute respiratory syndrome-related coronavirus
  REGION 1..15: note = Table B: HLA-DPA1*01:03-B1*03:01L HLA-DRB1*03:01L HLA-DRB1*14:02L HLA-DRB4*01:01L HLA-DPA1*01:03-B1*04:02L HLA-DRB3*01:01L
  source 1..15: note = Severe acute respiratory syndrome coronavirus 2
APLTVFFDGRVDGQV

SEQ ID NO: 20977 - protein, 14 aa, Severe acute respiratory syndrome-related coronavirus
  REGION 1..14: note = Table B: HLA-DPA1*01:03-B1*03:01L
  source 1..14: note = Severe acute respiratory syndrome coronavirus 2
GQVDLFRNARNGVL

SEQ ID NO: 20978 - protein, 14 aa, Severe acute respiratory syndrome-related coronavirus
  REGION 1..14: note = Table B: HLA-DPA1*01:03-B1*03:01L HLA-DQA1*01:01-B1*05:01L HLA-DRB1*08:01L HLA-DRB1*11:01L HLA-DPA1*02:01-B1*13:01L
  source 1..14: note = Severe acute respiratory syndrome coronavirus 2
GSVKGLQPSVGPKQ

SEQ ID NO: 20979 - protein, 13 aa, Severe acute respiratory syndrome-related coronavirus
  REGION 1..13: note = Table B: HLA-DPA1*01:03-B1*03:01L HLA-DRB1*12:01L HLA-DRB1*16:01L
  source 1..13: note = Severe acute respiratory syndrome coronavirus 2
VGPKQASLNGVTL

SEQ ID NO: 20980 - protein, 10 aa, Severe acute respiratory syndrome-related coronavirus
  REGION 1..10: note = Table B: HLA-DPA1*01:03-B1*03:01L HLA-DRB1*03:01L HLA-DRB1*11:02L HLA-DQA1*05:05-B1*03:19M HLA-DQA1*05:01-B1*02:01L HLA-DPA1*01:03-B1*104:01L HLA-DRB1*16:01L
  source 1..10: note = Severe acute respiratory syndrome coronavirus 2
FIERYKLEGY

SEQ ID NO: 20981 - protein, 18 aa, Severe acute respiratory syndrome-related coronavirus
  REGION 1..18: note = Table B: HLA-DPA1*01:03-B1*03:01L HLA-DRB1*14:02L HLA-DQA1*05:05-B1*03:19L HLA-DPA1*03:01-B1*105:01L
  source 1..18: note = Severe acute respiratory syndrome coronavirus 2
GGLHLLIGLAKRFKESPF

SEQ ID NO: 20982 - protein, 18 aa, Severe acute respiratory syndrome-related coronavirus
  REGION 1..18: note = Table B: HLA-DPA1*01:03-B1*03:01L HLA-DRB1*03:01L HLA-DQA1*05:05-B1*03:116L HLA-DPA1*01:03-B1*104:01L HLA-DQA1*05:05-B1*03:01L
  source 1..18: note = Severe acute respiratory syndrome coronavirus 2
GLHLLIGLAKRFKESPFE

SEQ ID NO: 20983 - protein, 14 aa, Severe acute respiratory syndrome-related coronavirus
  REGION 1..14: note = Table B: HLA-DPA1*01:03-B1*03:01L
  source 1..14: note = Severe acute respiratory syndrome coronavirus 2
GLAKRFKESPFELE

SEQ ID NO: 20984 - protein, 16 aa, Severe acute respiratory syndrome-related coronavirus
  REGION 1..16: note = Table B: HLA-DPA1*01:03-B1*03:01L HLA-DPA1*01:03-B1*104:01L
  source 1..16: note = Severe acute respiratory syndrome coronavirus 2
YTEISFMLWCKDGHVE

SEQ ID NO: 20985 - protein, 11 aa, Severe acute respiratory syndrome-related coronavirus
  REGION 1..11: note = Table B: HLA-DPA1*01:03-B1*03:01L HLA-DRB1*14:02L HLA-DPA1*01:03-B1*104:01L HLA-DRB1*16:01L HLA-DRB1*15:03L
  source 1..11: note = Severe acute respiratory syndrome coronavirus 2
WQPGVAMPNLY

SEQ ID NO: 20986 - protein, 11 aa, Severe acute respiratory syndrome-related coronavirus
  REGION 1..11: note = Table B: HLA-DPA1*01:03-B1*03:01L HLA-DQA1*05:01-B1*02:01L HLA-DQA1*01:03-B1*06:01L HLA-DQA1*02:01-B1*03:03L
  source 1..11: note = Severe acute respiratory syndrome coronavirus 2
NVAKYTQLCQY

SEQ ID NO: 20987 - protein, 13 aa, Severe acute respiratory syndrome-related coronavirus
  REGION 1..13: note = Table B: HLA-DPA1*01:03-B1*03:01L HLA-DQA1*01:03-B1*06:01L
  source 1..13: note = Severe acute respiratory syndrome coronavirus 2
GAGSDKGVAPGTA

SEQ ID NO: 20988 - protein, 15 aa, Severe acute respiratory syndrome-related coronavirus
  REGION 1..15: note = Table B: HLA-DPA1*01:03-B1*03:01L HLA-DRB1*15:03L
  source 1..15: note = Severe acute respiratory syndrome coronavirus 2
AGSDKGVAPGTAVLR

SEQ ID NO: 20989 - protein, 19 aa, Severe acute respiratory syndrome-related coronavirus
  REGION 1..19: note = Table B: HLA-DPA1*01:03-B1*03:01L HLA-DPA1*01:03-B1*04:02L
  source 1..19: note = Severe acute respiratory syndrome coronavirus 2
PTGTLLVDSDLNDFVSDAD

SEQ ID NO: 20990 - protein, 16 aa, Severe acute respiratory syndrome-related coronavirus
  REGION 1..16: note = Table B: HLA-DPA1*01:03-B1*03:01L HLA-DRB1*11:02L HLA-DRB1*14:02L HLA-DQA1*05:05-B1*03:19L HLA-DPA1*01:03-B1*04:01L HLA-DPA1*02:01-B1*13:01L
  source 1..16: note = Severe acute respiratory syndrome coronavirus 2
EAFLIGCNYLGKPREQ

SEQ ID NO: 20991 - protein, 13 aa, Severe acute respiratory syndrome-related coronavirus
  REGION 1..13: note = Table B: HLA-DPA1*01:03-B1*03:01L
  source 1..13: note = Severe acute respiratory syndrome coronavirus 2
NPIQLSSYSLFDM

SEQ ID NO: 20992 - protein, 16 aa, Severe acute respiratory syndrome-related coronavirus
  REGION 1..16: note = Table B: HLA-DPA1*01:03-B1*03:01L
  source 1..16: note = Severe acute respiratory syndrome coronavirus 2
AVMSLKEGQINDMILS

SEQ ID NO: 20993 - protein, 16 aa, Severe acute respiratory syndrome-related coronavirus
  REGION 1..16: note = Table B: HLA-DPA1*01:03-B1*03:01L HLA-DRB1*14:02L HLA-DQA1*05:05-B1*03:19L HLA-DPA1*03:01-B1*105:01L
  source 1..16: note = Severe acute respiratory syndrome coronavirus 2
ILSLLSKGRLIIRENN

SEQ ID NO: 20994 - protein, 14 aa, Severe acute respiratory syndrome-related coronavirus
  REGION 1..14: note = Table B: HLA-DPA1*01:03-B1*03:01L
  source 1..14: note = Severe acute respiratory syndrome coronavirus 2
TRTQLPPAYTNSFT

SEQ ID NO: 20995 - protein, 15 aa, Severe acute respiratory syndrome-related coronavirus
  REGION 1..15: note = Table B: HLA-DPA1*01:03-B1*03:01L HLA-DPA1*02:01-B1*13:01L HLA-DQA1*05:05-B1*03:01L
  source 1..15: note = Severe acute respiratory syndrome coronavirus 2
NVVIKVCEFQFCNDP

SEQ ID NO: 20996 - protein, 10 aa, Severe acute respiratory syndrome-related coronavirus
  REGION 1..10: note = Table B: HLA-DPA1*01:03-B1*03:01L HLA-DQA1*05:05-B1*03:19M HLA-DQA1*05:01-B1*02:01L HLA-DPA1*01:03-B1*104:01L
  source 1..10: note = Severe acute respiratory syndrome coronavirus 2
CNDPFLGVYY

SEQ ID NO: 20997 - protein, 16 aa, Severe acute respiratory syndrome-related coronavirus
  REGION 1..16: note = Table B: HLA-DPA1*01:03-B1*03:01L HLA-DRB1*13:01L HLA-DPA1*01:03-B1*104:01L HLA-DQA1*05:05-B1*03:01L
  source 1..16: note = Severe acute respiratory syndrome coronavirus 2
LGVYYHKNNKSWMESE

SEQ ID NO: 20998 - protein, 16 aa, Severe acute respiratory syndrome-related coronavirus
  REGION 1..16: note = Table B: HLA-DPA1*01:03-B1*03:01L
  source 1..16: note = Severe acute respiratory syndrome coronavirus 2
GVYYHKNNKSWMESEF

SEQ ID NO: 20999 - protein, 16 aa, Severe acute respiratory syndrome-related coronavirus
  REGION 1..16: note = Table B: HLA-DPA1*01:03-B1*03:01L HLA-DRB1*03:01L
  source 1..16: note = Severe acute respiratory syndrome coronavirus 2
VYYHKNNKSWMESEFR

SEQ ID NO: 21000 - protein, 12 aa, Severe acute respiratory syndrome-related coronavirus
  REGION 1..12: note = Table B: HLA-DPA1*01:03-B1*03:01L HLA-DRB1*12:01L
  source 1..12: note = Severe acute respiratory syndrome coronavirus 2
FRVYSSANNCTF

SEQ ID NO: 21001 - protein, 12 aa, Severe acute respiratory syndrome-related coronavirus
  REGION 1..12: note = Table B: HLA-DPA1*01:03-B1*03:01L HLA-DRB1*14:02L HLA-DRB1*12:01L HLA-DPA1*03:01-B1*105:01L HLA-DPA1*01:03-B1*104:01L HLA-DQA1*05:05-B1*03:01L HLA-DQA1*02:01-B1*03:03L
  source 1..12: note = Severe acute respiratory syndrome coronavirus 2
VYSSANNCTFEY

SEQ ID NO: 21002 - protein, 18 aa, Severe acute respiratory syndrome-related coronavirus
  REGION 1..18: note = Table B: HLA-DPA1*01:03-B1*03:01L HLA-DRB1*11:02L HLA-DQA1*05:05-B1*03:19L HLA-DPA1*01:03-B1*04:02L HLA-DQA1*05:05-B1*03:01L
  source 1..18: note = Severe acute respiratory syndrome coronavirus 2
GKQGNFKNLREFVFKNID

SEQ ID NO: 21003 - protein, 18 aa, Severe acute respiratory syndrome-related coronavirus
  REGION 1..18: note = Table B: HLA-DPA1*01:03-B1*03:01L HLA-DPA1*01:03-B1*04:02L
  source 1..18: note = Severe acute respiratory syndrome coronavirus 2
KQGNFKNLREFVFKNIDG

SEQ ID NO: 21004 - protein, 18 aa, Severe acute respiratory syndrome-related coronavirus
  REGION 1..18: note = Table B: HLA-DPA1*01:03-B1*03:01L HLA-DQA1*05:05-B1*03:01L
  source 1..18: note = Severe acute respiratory syndrome coronavirus 2
FKIYSKHTPINLVRDLPQ

SEQ ID NO: 21005 - protein, 11 aa, Severe acute respiratory syndrome-related coronavirus
  REGION 1..11: note = Table B: HLA-DPA1*01:03-B1*03:01L
  source 1..11: note = Severe acute respiratory syndrome coronavirus 2
NLVRDLPQGFS

SEQ ID NO: 21006 - protein, 12 aa, Severe acute respiratory syndrome-related coronavirus
  REGION 1..12: note = Table B: HLA-DPA1*01:03-B1*03:01L HLA-DPA1*01:03-B1*104:01L
  source 1..12: note = Severe acute respiratory syndrome coronavirus 2
WTAGAAAYYVGY

SEQ ID NO: 21007 - protein, 11 aa, Severe acute respiratory syndrome-related coronavirus
  REGION 1..11: note = Table B: HLA-DPA1*01:03-B1*03:01L HLA-DRB1*14:02L HLA-DQA1*01-B1*05L HLA-DRB4*01:01L HLA-DPA1*01:03-B1*04:01L HLA-DPA1*01:03-B1*04:02L HLA-DPA1*02:01-B1*13:01L HLA-DPA1*01:03-B1*104:01L HLA-DRB1*16:01L
  REGION 1..11: note = CONT. FROM ABOVE: HLA-DQA1*01:03-B1*06:01L
  source 1..11: note = Severe acute respiratory syndrome coronavirus 2
YLQPRTFLLKY

SEQ ID NO: 21008 - protein, 18 aa, Severe acute respiratory syndrome-related coronavirus
  REGION 1..18: note = Table B: HLA-DPA1*01:03-B1*03:01L
  source 1..18: note = Severe acute respiratory syndrome coronavirus 2
DPLSETKCTLKSFTVEKG

SEQ ID NO: 21009 - protein, 13 aa, Severe acute respiratory syndrome-related coronavirus
  REGION 1..13: note = Table B: HLA-DPA1*01:03-B1*03:01L HLA-DPA1*02:01-B1*13:01L
  source 1..13: note = Severe acute respiratory syndrome coronavirus 2
SPTKLNDLCFTNV

SEQ ID NO: 21010 - protein, 12 aa, Severe acute respiratory syndrome-related coronavirus
  REGION 1..12: note = Table B: HLA-DPA1*01:03-B1*03:01L HLA-DPA1*03:01-B1*04:02L HLA-DRB1*14:01L HLA-DPA1*01:03-B1*04:01L HLA-DRB1*12:01L HLA-DPA1*01:03-B1*104:01L HLA-DPA1*01:02-B1*04:01L HLA-DRB1*16:01L HLA-DRB1*04:08L
  source 1..12: note = Severe acute respiratory syndrome coronavirus 2
IAPGQTGKIADY

SEQ ID NO: 21011 - protein, 13 aa, Severe acute respiratory syndrome-related coronavirus
  REGION 1..13: note = Table B: HLA-DPA1*01:03-B1*03:01L HLA-DRB1*14:02L HLA-DQA1*05:05-B1*03:19L HLA-DPA1*02:01-B1*13:01L
  source 1..13: note = Severe acute respiratory syndrome coronavirus 2
IAWNSNNLDSKVG

SEQ ID NO: 21012 - protein, 14 aa, Severe acute respiratory syndrome-related coronavirus
  REGION 1..14: note = Table B: HLA-DPA1*01:03-B1*03:01L HLA-DPA1*03:01-B1*04:02L HLA-DRB1*11:01L HLA-DQA1*01-B1*05L HLA-DRB1*07:01L HLA-DRB1*08:03L
  source 1..14: note = Severe acute respiratory syndrome coronavirus 2
ISTEIYQAGSTPCN

SEQ ID NO: 21013 - protein, 14 aa, Severe acute respiratory syndrome-related coronavirus
  REGION 1..14: note = Table B: HLA-DPA1*01:03-B1*03:01L HLA-DPA1*01:03-B1*04:02L HLA-DRB1*12:01L HLA-DRB1*16:01L HLA-DRB1*04:08L
  source 1..14: note = Severe acute respiratory syndrome coronavirus 2
QPYRVVVLSFELLH

SEQ ID NO: 21014 - protein, 14 aa, Severe acute respiratory syndrome-related coronavirus
  REGION 1..14: note = Table B: HLA-DPA1*01:03-B1*03:01L HLA-DRB1*14:02L
  source 1..14: note = Severe acute respiratory syndrome coronavirus 2
VNFNFNGLTGTGVL

SEQ ID NO: 21015 - protein, 13 aa, Severe acute respiratory syndrome-related coronavirus
  REGION 1..13: note = Table B: HLA-DPA1*01:03-B1*03:01L HLA-DRB1*08:01L
  source 1..13: note = Severe acute respiratory syndrome coronavirus 2
GLTGTGVLTESNK

SEQ ID NO: 21016 - protein, 16 aa, Severe acute respiratory syndrome-related coronavirus
  REGION 1..16: note = Table B: HLA-DPA1*01:03-B1*03:01L HLA-DQA1*05:05-B1*03:01L
  source 1..16: note = Severe acute respiratory syndrome coronavirus 2
DAVRDPQTLEILDITP

SEQ ID NO: 21017 - protein, 15 aa, Severe acute respiratory syndrome-related coronavirus
  REGION 1..15: note = Table B: HLA-DPA1*01:03-B1*03:01L HLA-DPA1*02:01-B1*13:01L HLA-DRB1*15:03L
  source 1..15: note = Severe acute respiratory syndrome coronavirus 2
DVNCTEVPVAIHADQ

SEQ ID NO: 21018 - protein, 16 aa, Severe acute respiratory syndrome-related coronavirus
  REGION 1..16: note = Table B: HLA-DPA1*01:03-B1*03:01L HLA-DPA1*02:01-B1*13:01L
  source 1..16: note = Severe acute respiratory syndrome coronavirus 2
GSNVFQTRAGCLIGAE

SEQ ID NO: 21019 - protein, 13 aa, Severe acute respiratory syndrome-related coronavirus
  REGION 1..13: note = Table B: HLA-DPA1*01:03-B1*03:01L HLA-DPA1*01:03-B1*04:02L HLA-DRB1*04:08L
  source 1..13: note = Severe acute respiratory syndrome coronavirus 2
YSNNSIAIPTNFT

SEQ ID NO: 21020 - protein, 13 aa, Severe acute respiratory syndrome-related coronavirus
  REGION 1..13: note = Table B: HLA-DPA1*01:03-B1*03:01L
  source 1..13: note = Severe acute respiratory syndrome coronavirus 2
VTTEILPVSMTKT

SEQ ID NO: 21021 - protein, 15 aa, Severe acute respiratory syndrome-related coronavirus
  REGION 1..15: note = Table B: HLA-DPA1*01:03-B1*03:01L HLA-DPA1*02:01-B1*13:01L
  source 1..15: note = Severe acute respiratory syndrome coronavirus 2
NLLLQYGSFCTQLNR

SEQ ID NO: 21022 - protein, 14 aa, Severe acute respiratory syndrome-related coronavirus
  REGION 1..14: note = Table B: HLA-DPA1*01:03-B1*03:01L HLA-DRB1*11:03L
  source 1..14: note = Severe acute respiratory syndrome coronavirus 2
LTGIAVEQDKNTQE

SEQ ID NO: 21023 - protein, 14 aa, Severe acute respiratory syndrome-related coronavirus
  REGION 1..14: note = Table B: HLA-DPA1*01:03-B1*03:01L HLA-DQA1*05:05-B1*03:01L
  source 1..14: note = Severe acute respiratory syndrome coronavirus 2
IYKTPPIKDFGGFN

SEQ ID NO: 21024 - protein, 12 aa, Severe acute respiratory syndrome-related coronavirus
  REGION 1..12: note = Table B: HLA-DPA1*01:03-B1*03:01L HLA-DRB1*04:08L
  source 1..12: note = Severe acute respiratory syndrome coronavirus 2
KVTLADAGFIKQ

SEQ ID NO: 21025 - protein, 18 aa, Severe acute respiratory syndrome-related coronavirus
  REGION 1..18: note = Table B: HLA-DPA1*01:03-B1*03:01L
  source 1..18: note = Severe acute respiratory syndrome coronavirus 2
ARDLICAQKFNGLTVLPP

SEQ ID NO: 21026 - protein, 13 aa, Severe acute respiratory syndrome-related coronavirus
  REGION 1..13: note = Table B: HLA-DPA1*01:03-B1*03:01L HLA-DRB1*14:02L HLA-DQA1*05:01-B1*02:01L HLA-DPA1*01:03-B1*04:01L HLA-DPA1*01:03-B1*04:02L HLA-DPA1*02:01-B1*13:01L HLA-DQA1*03:01-B1*03:02L HLA-DPA1*01:03-B1*104:01L
  REGION 1..13: note = CONT. FROM ABOVE: HLA-DPA1*01:02-B1*04:01L
  source 1..13: note = Severe acute respiratory syndrome coronavirus 2
IAQYTSALLAGTI

SEQ ID NO: 21027 - protein, 15 aa, Severe acute respiratory syndrome-related coronavirus
  REGION 1..15: note = Table B: HLA-DPA1*01:03-B1*03:01L HLA-DPA1*01:03-B1*04:02L
  source 1..15: note = Severe acute respiratory syndrome coronavirus 2
SGWTFGAGAALQIPF

SEQ ID NO: 21028 - protein, 13 aa, Severe acute respiratory syndrome-related coronavirus
  REGION 1..13: note = Table B: HLA-DPA1*01:03-B1*03:01L HLA-DRB1*14:01L
  source 1..13: note = Severe acute respiratory syndrome coronavirus 2
AGAALQIPFAMQM

SEQ ID NO: 21029 - protein, 15 aa, Severe acute respiratory syndrome-related coronavirus
  REGION 1..15: note = Table B: HLA-DPA1*01:03-B1*03:01L HLA-DRB1*07:01L
  source 1..15: note = Severe acute respiratory syndrome coronavirus 2
VTQNVLYENQKLIAN

SEQ ID NO: 21030 - protein, 14 aa, Severe acute respiratory syndrome-related coronavirus
  REGION 1..14: note = Table B: HLA-DPA1*01:03-B1*03:01L HLA-DPA1*02:01-B1*13:01L
  source 1..14: note = Severe acute respiratory syndrome coronavirus 2
AIGKIQDSLSSTAS

SEQ ID NO: 21031 - protein, 14 aa, Severe acute respiratory syndrome-related coronavirus
  REGION 1..14: note = Table B: HLA-DPA1*01:03-B1*03:01L
  source 1..14: note = Severe acute respiratory syndrome coronavirus 2
VNQNAQALNTLVKQ

SEQ ID NO: 21032 - protein, 15 aa, Severe acute respiratory syndrome-related coronavirus
  REGION 1..15: note = Table B: HLA-DPA1*01:03-B1*03:01L HLA-DPA1*01:03-B1*104:01L
  source 1..15: note = Severe acute respiratory syndrome coronavirus 2
ILSRLDKVEAEVQID

SEQ ID NO: 21033 - protein, 12 aa, Severe acute respiratory syndrome-related coronavirus
  REGION 1..12: note = Table B: HLA-DPA1*01:03-B1*03:01L
  source 1..12: note = Severe acute respiratory syndrome coronavirus 2
IRASANLAATKM

SEQ ID NO: 21034 - protein, 14 aa, Severe acute respiratory syndrome-related coronavirus
  REGION 1..14: note = Table B: HLA-DPA1*01:03-B1*03:01L HLA-DPA1*01:03-B1*02:01L
  source 1..14: note = Severe acute respiratory syndrome coronavirus 2
ASANLAATKMSECV

SEQ ID NO: 21035 - protein, 13 aa, Severe acute respiratory syndrome-related coronavirus
  REGION 1..13: note = Table B: HLA-DPA1*01:03-B1*03:01L HLA-DPA1*02:01-B1*13:01L HLA-DPA1*03:01-B1*105:01L HLA-DQA1*05:05-B1*03:01L HLA-DQA1*02:01-B1*03:03L
  source 1..13: note = Severe acute respiratory syndrome coronavirus 2
AATKMSECVLGQS

SEQ ID NO: 21036 - protein, 13 aa, Severe acute respiratory syndrome-related coronavirus
  REGION 1..13: note = Table B: HLA-DPA1*01:03-B1*03:01L HLA-DQA1*01:01-B1*05:01L HLA-DQA1*01-B1*05L HLA-DQA1*05:05-B1*03:19L HLA-DPA1*02:01-B1*13:01L
  source 1..13: note = Severe acute respiratory syndrome coronavirus 2
YHLMSFPQSAPHG

SEQ ID NO: 21037 - protein, 12 aa, Severe acute respiratory syndrome-related coronavirus
  REGION 1..12: note = Table B: HLA-DPA1*01:03-B1*03:01L
  source 1..12: note = Severe acute respiratory syndrome coronavirus 2
EKNFTTAPAICH

SEQ ID NO: 21038 - protein, 15 aa, Severe acute respiratory syndrome-related coronavirus
  REGION 1..15: note = Table B: HLA-DPA1*01:03-B1*03:01L
  source 1..15: note = Severe acute respiratory syndrome coronavirus 2
PAICHDGKAHFPREG

SEQ ID NO: 21039 - protein, 13 aa, Severe acute respiratory syndrome-related coronavirus
  REGION 1..13: note = Table B: HLA-DPA1*01:03-B1*03:01L HLA-DQA1*01:01-B1*05:01L HLA-DRB1*04:08L HLA-DRB1*15:03L
  source 1..13: note = Severe acute respiratory syndrome coronavirus 2
DISGINASVVNIQ

SEQ ID NO: 21040 - protein, 11 aa, Severe acute respiratory syndrome-related coronavirus
  REGION 1..11: note = Table B: HLA-DPA1*01:03-B1*03:01L HLA-DQA1*05:05-B1*03:116L HLA-DRB1*04:10L HLA-DPA1*01:02-B1*04:01L HLA-DRB1*15:03L
  source 1..11: note = Severe acute respiratory syndrome coronavirus 2
INASVVNIQKE

SEQ ID NO: 21041 - protein, 16 aa, Severe acute respiratory syndrome-related coronavirus
  REGION 1..16: note = Table B: HLA-DPA1*01:03-B1*03:01L
  source 1..16: note = Severe acute respiratory syndrome coronavirus 2
EDDSEPVLKGVKLHYT

SEQ ID NO: 21042 - protein, 14 aa, Severe acute respiratory syndrome-related coronavirus
  REGION 1..14: note = Table B: HLA-DPA1*01:03-B1*03:01L
  source 1..14: note = Severe acute respiratory syndrome coronavirus 2
IFTIGTVTLKQGEI

SEQ ID NO: 21043 - protein, 14 aa, Severe acute respiratory syndrome-related coronavirus
  REGION 1..14: note = Table B: HLA-DPA1*01:03-B1*03:01L
  source 1..14: note = Severe acute respiratory syndrome coronavirus 2
ATATIPIQASLPFG

SEQ ID NO: 21044 - protein, 14 aa, Severe acute respiratory syndrome-related coronavirus
  REGION 1..14: note = Table B: HLA-DPA1*01:03-B1*03:01L
  source 1..14: note = Severe acute respiratory syndrome coronavirus 2
VGVALLAVFQSASK

SEQ ID NO: 21045 - protein, 13 aa, Severe acute respiratory syndrome-related coronavirus
  REGION 1..13: note = Table B: HLA-DPA1*01:03-B1*03:01L HLA-DQA1*05:05-B1*03:01L
  source 1..13: note = Severe acute respiratory syndrome coronavirus 2
VYSHLLLVAAGLE

SEQ ID NO: 21046 - protein, 11 aa, Severe acute respiratory syndrome-related coronavirus
  REGION 1..11: note = Table B: HLA-DPA1*01:03-B1*03:01L HLA-DRB1*12:01L HLA-DQA1*05:05-B1*03:01L HLA-DRB1*04:08L
  source 1..11: note = Severe acute respiratory syndrome coronavirus 2
FLQSINFVRII

SEQ ID NO: 21047 - protein, 15 aa, Severe acute respiratory syndrome-related coronavirus
  REGION 1..15: note = Table B: HLA-DPA1*01:03-B1*03:01L HLA-DRB1*08:01L HLA-DRB1*11:01L HLA-DPA1*03:01-B1*105:01L
  source 1..15: note = Severe acute respiratory syndrome coronavirus 2
VITSGDGTTSPISEH

SEQ ID NO: 21048 - protein, 15 aa, Severe acute respiratory syndrome-related coronavirus
  REGION 1..15: note = Table B: HLA-DPA1*01:03-B1*03:01L
  source 1..15: note = Severe acute respiratory syndrome coronavirus 2
SGVKDCVVLHSYFTS

SEQ ID NO: 21049 - protein, 16 aa, Severe acute respiratory syndrome-related coronavirus
  REGION 1..16: note = Table B: HLA-DPA1*01:03-B1*03:01L HLA-DQA1*05:01-B1*02:01L HLA-DPA1*01:03-B1*104:01L
  source 1..16: note = Severe acute respiratory syndrome coronavirus 2
VEHVTFFIYNKIVDEP

SEQ ID NO: 21050 - protein, 13 aa, Severe acute respiratory syndrome-related coronavirus
  REGION 1..13: note = Table B: HLA-DPA1*01:03-B1*03:01L HLA-DRB1*11:03L
  source 1..13: note = Severe acute respiratory syndrome coronavirus 2
SFVSEETGTLIVN

SEQ ID NO: 21051 - protein, 13 aa, Severe acute respiratory syndrome-related coronavirus
  REGION 1..13: note = Table B: HLA-DPA1*01:03-B1*03:01L HLA-DQA1*01-B1*05L
  source 1..13: note = Severe acute respiratory syndrome coronavirus 2
VSEETGTLIVNSV

SEQ ID NO: 21052 - protein, 12 aa, Severe acute respiratory syndrome-related coronavirus
  REGION 1..12: note = Table B: HLA-DPA1*01:03-B1*03:01L
  source 1..12: note = Severe acute respiratory syndrome coronavirus 2
LVTLAILTALRL

SEQ ID NO: 21053 - protein, 11 aa, Severe acute respiratory syndrome-related coronavirus
  REGION 1..11: note = Table B: HLA-DPA1*01:03-B1*03:01L HLA-DPA1*03:01-B1*04:02L HLA-DRB1*14:01L HLA-DRB1*14:02L HLA-DPA1*01:03-B1*04:01L HLA-DPA1*02:01-B1*13:01L HLA-DQA1*05:05-B1*03:01L
  source 1..11: note = Severe acute respiratory syndrome coronavirus 2
IVNVSLVKPSF

SEQ ID NO: 21054 - protein, 11 aa, Severe acute respiratory syndrome-related coronavirus
  REGION 1..11: note = Table B: HLA-DPA1*01:03-B1*03:01L
  source 1..11: note = Severe acute respiratory syndrome coronavirus 2
FAYANRNRFLY

SEQ ID NO: 21055 - protein, 14 aa, Severe acute respiratory syndrome-related coronavirus
  REGION 1..14: note = Table B: HLA-DPA1*01:03-B1*03:01L
  source 1..14: note = Severe acute respiratory syndrome coronavirus 2
ITGGIAIAMACLVG

SEQ ID NO: 21056 - protein, 15 aa, Severe acute respiratory syndrome-related coronavirus
  REGION 1..15: note = Table B: HLA-DPA1*01:03-B1*03:01L
  source 1..15: note = Severe acute respiratory syndrome coronavirus 2
FARTRSMWSFNPETN

SEQ ID NO: 21057 - protein, 12 aa, Severe acute respiratory syndrome-related coronavirus
  REGION 1..12: note = Table B: HLA-DPA1*01:03-B1*03:01L HLA-DPA1*01:03-B1*04:02L
  source 1..12: note = Severe acute respiratory syndrome coronavirus 2
SMWSFNPETNIL

SEQ ID NO: 21058 - protein, 15 aa, Severe acute respiratory syndrome-related coronavirus
  REGION 1..15: note = Table B: HLA-DPA1*01:03-B1*03:01L
  source 1..15: note = Severe acute respiratory syndrome coronavirus 2
HGTILTRPLLESELV

SEQ ID NO: 21059 - protein, 15 aa, Severe acute respiratory syndrome-related coronavirus
  REGION 1..15: note = Table B: HLA-DPA1*01:03-B1*03:01L HLA-DPA1*01:03-B1*04:02L
  source 1..15: note = Severe acute respiratory syndrome coronavirus 2
ESELVIGAVILRGHL

SEQ ID NO: 21060 - protein, 12 aa, Severe acute respiratory syndrome-related coronavirus
  REGION 1..12: note = Table B: HLA-DPA1*01:03-B1*03:01L
  source 1..12: note = Severe acute respiratory syndrome coronavirus 2
YKLGASQRVAGD

SEQ ID NO: 21061 - protein, 12 aa, Severe acute respiratory syndrome-related coronavirus
  REGION 1..12: note = Table B: HLA-DPA1*01:03-B1*03:01L
  source 1..12: note = Severe acute respiratory syndrome coronavirus 2
LVDFQVTIAEIL

SEQ ID NO: 21062 - protein, 15 aa, Severe acute respiratory syndrome-related coronavirus
  REGION 1..15: note = Table B: HLA-DPA1*01:03-B1*03:01L
  source 1..15: note = Severe acute respiratory syndrome coronavirus 2
IAEILLIIMRTFKVS

SEQ ID NO: 21063 - protein, 14 aa, Severe acute respiratory syndrome-related coronavirus
  REGION 1..14: note = Table B: HLA-DPA1*01:03-B1*03:01L HLA-DPA1*01:03-B1*04:02L
  source 1..14: note = Severe acute respiratory syndrome coronavirus 2
LITLATCELYHYQE

SEQ ID NO: 21064 - protein, 15 aa, Severe acute respiratory syndrome-related coronavirus
  REGION 1..15: note = Table B: HLA-DPA1*01:03-B1*03:01L HLA-DRB1*03:01L HLA-DRB1*11:02L HLA-DRB1*14:02L HLA-DPA1*01:03-B1*04:02L HLA-DPA1*01:03-B1*02:01L HLA-DRB1*14:17L HLA-DRB1*08:02L HLA-DRB1*08:03L
  source 1..15: note = Severe acute respiratory syndrome coronavirus 2
SKWYIRVGARKSAPL

SEQ ID NO: 21065 - protein, 14 aa, Severe acute respiratory syndrome-related coronavirus
  REGION 1..14: note = Table B: HLA-DPA1*01:03-B1*03:01L HLA-DPA1*02:01-B1*13:01L HLA-DPA1*01:03-B1*104:01L
  source 1..14: note = Severe acute respiratory syndrome coronavirus 2
GARKSAPLIELCVD

SEQ ID NO: 21066 - protein, 13 aa, Severe acute respiratory syndrome-related coronavirus
  REGION 1..13: note = Table B: HLA-DPA1*01:03-B1*03:01L
  source 1..13: note = Severe acute respiratory syndrome coronavirus 2
DIGNYTVSCLPFT

SEQ ID NO: 21067 - protein, 20 aa, Severe acute respiratory syndrome-related coronavirus
  REGION 1..20: note = Table B: HLA-DPA1*01:03-B1*03:01L
  source 1..20: note = Severe acute respiratory syndrome coronavirus 2
SPDDQIGYYRRATRRIRGGD

SEQ ID NO: 21068 - protein, 10 aa, Severe acute respiratory syndrome-related coronavirus
  REGION 1..10: note = Table B: HLA-DPA1*01:03-B1*03:01L HLA-DRB1*03:01L HLA-DRB1*11:02L HLA-DQA1*01-B1*05L HLA-DQA1*05:05-B1*03:19M HLA-DQA1*05:01-B1*02:01L HLA-DRB4*01:01L HLA-DPA1*01:03-B1*104:01L HLA-DRB1*16:01L
  REGION 1..10: note = CONT. FROM ABOVE: HLA-DQA1*02:01-B1*03:03L
  source 1..10: note = Severe acute respiratory syndrome coronavirus 2
KDLSPRWYFY

SEQ ID NO: 21069 - protein, 14 aa, Severe acute respiratory syndrome-related coronavirus
  REGION 1..14: note = Table B: HLA-DPA1*01:03-B1*03:01L HLA-DRB1*13:01L
  source 1..14: note = Severe acute respiratory syndrome coronavirus 2
ALLLLDRLNQLESK

SEQ ID NO: 21070 - protein, 17 aa, Severe acute respiratory syndrome-related coronavirus
  REGION 1..17: note = Table B: HLA-DPA1*01:03-B1*03:01L HLA-DRB1*11:02L
  source 1..17: note = Severe acute respiratory syndrome coronavirus 2
ATKAYNVTQAFGRRGPE

SEQ ID NO: 21071 - protein, 14 aa, Severe acute respiratory syndrome-related coronavirus
  REGION 1..14: note = Table B: HLA-DPA1*01:03-B1*03:01L HLA-DQA1*05:05-B1*03:19L HLA-DPA1*03:01-B1*105:01L HLA-DRB1*04:08L
  source 1..14: note = Severe acute respiratory syndrome coronavirus 2
HWPQIAQFAPSASA

SEQ ID NO: 21072 - protein, 19 aa, Severe acute respiratory syndrome-related coronavirus
  REGION 1..19: note = Table B: HLA-DPA1*01:03-B1*03:01L HLA-DPA1*01:03-B1*104:01L
  source 1..19: note = Severe acute respiratory syndrome coronavirus 2
PSASAFFGMSRIGMEVTPS

SEQ ID NO: 21073 - protein, 12 aa, Severe acute respiratory syndrome-related coronavirus
  REGION 1..12: note = Table B: HLA-DPA1*01:03-B1*03:01L HLA-DRB1*03:01L HLA-DRB1*11:03L HLA-DRB1*14:02L HLA-DRB1*11:01L HLA-DRB3*01:01L
  source 1..12: note = Severe acute respiratory syndrome coronavirus 2
GAIKLDDKDPNF

SEQ ID NO: 21074 - protein, 12 aa, Severe acute respiratory syndrome-related coronavirus
  REGION 1..12: note = Table B: HLA-DPA1*01:03-B1*03:01L HLA-DRB1*14:02L HLA-DQA1*05:01-B1*02:01L
  source 1..12: note = Severe acute respiratory syndrome coronavirus 2
IKLDDKDPNFKD

SEQ ID NO: 21075 - protein, 16 aa, Severe acute respiratory syndrome-related coronavirus
  REGION 1..16: note = Table B: HLA-DPA1*03:01-B1*04:02L HLA-DRB1*03:01L HLA-DRB1*11:02L HLA-DRB1*14:02L HLA-DQA1*05:05-B1*03:19L HLA-DRB1*13:01L HLA-DQA1*05:05-B1*03:116L HLA-DPA1*01:03-B1*04:02L HLA-DPA1*02:01-B1*13:01L
  REGION 1..16: note = CONT. FROM ABOVE: HLA-DPA1*03:01-B1*105:01L HLA-DPA1*01:03-B1*02 :01L HLA-DQA1*05:05-B1*03:01L HLA-DPA1*01:02-B1*04:01L HLA-DRB1* 07:01L HLA-DRB1*10:01L HLA-DRB1*08:02L
  source 1..16: note = Severe acute respiratory syndrome coronavirus 2
QPYVFIKRSDARTAPH

SEQ ID NO: 21076 - protein, 13 aa, Severe acute respiratory syndrome-related coronavirus
  REGION 1..13: note = Table B: HLA-DPA1*03:01-B1*04:02L HLA-DPA1*01:02-B1*04:01L
  source 1..13: note = Severe acute respiratory syndrome coronavirus 2
VLVPHVGEIPVAY

SEQ ID NO: 21077 - protein, 12 aa, Severe acute respiratory syndrome-related coronavirus
  REGION 1..12: note = Table B: HLA-DPA1*03:01-B1*04:02L HLA-DPA1*01:03-B1*04:01L HLA-DRB1*12:01L HLA-DPA1*01:02-B1*04:01L HLA-DRB1*16:01L HLA-DRB1*15:03L
  source 1..12: note = Severe acute respiratory syndrome coronavirus 2
GDELGTDPYEDF

SEQ ID NO: 21078 - protein, 11 aa, Severe acute respiratory syndrome-related coronavirus
  REGION 1..11: note = Table B: HLA-DPA1*03:01-B1*04:02L HLA-DQA1*01-B1*05L HLA-DQA1*05:01-B1*02:01L HLA-DPA1*03:01-B1*105:01L HLA-DQA1*01:03-B1*06:01L
  source 1..11: note = Severe acute respiratory syndrome coronavirus 2
ELGTDPYEDFQ

SEQ ID NO: 21079 - protein, 12 aa, Severe acute respiratory syndrome-related coronavirus
  REGION 1..12: note = Table B: HLA-DPA1*03:01-B1*04:02L HLA-DPA1*03:01-B1*105:01L HLA-DRB1*16:01L HLA-DQA1*01:03-B1*06:01L HLA-DQA1*02:01-B1*03:03L
  source 1..12: note = Severe acute respiratory syndrome coronavirus 2
LGTDPYEDFQEN

SEQ ID NO: 21080 - protein, 16 aa, Severe acute respiratory syndrome-related coronavirus
  REGION 1..16: note = Table B: HLA-DPA1*03:01-B1*04:02L HLA-DRB1*14:02L HLA-DPA1*01:03-B1*04:02L HLA-DPA1*01:03-B1*104:01L
  source 1..16: note = Severe acute respiratory syndrome coronavirus 2
FDTFNGECPNFVFPLN

SEQ ID NO: 21081 - protein, 13 aa, Severe acute respiratory syndrome-related coronavirus
  REGION 1..13: note = Table B: HLA-DPA1*03:01-B1*04:02L HLA-DPA1*01:02-B1*04:01L
  source 1..13: note = Severe acute respiratory syndrome coronavirus 2
TIAFGGCVFSYVG

SEQ ID NO: 21082 - protein, 14 aa, Severe acute respiratory syndrome-related coronavirus
  REGION 1..14: note = Table B: HLA-DPA1*03:01-B1*04:02L
  source 1..14: note = Severe acute respiratory syndrome coronavirus 2
EGLNDNLLEILQKE

SEQ ID NO: 21083 - protein, 16 aa, Severe acute respiratory syndrome-related coronavirus
  REGION 1..16: note = Table B: HLA-DPA1*03:01-B1*04:02L HLA-DQA1*05:05-B1*03:19L
  source 1..16: note = Severe acute respiratory syndrome coronavirus 2
ILQKEKVNINIVGDFK

SEQ ID NO: 21084 - protein, 13 aa, Severe acute respiratory syndrome-related coronavirus
  REGION 1..13: note = Table B: HLA-DPA1*03:01-B1*04:02L HLA-DPA1*01:03-B1*04:01L HLA-DRB1*04:10L HLA-DPA1*02:01-B1*13:01L HLA-DPA1*01:03-B1*104:01L
  source 1..13: note = Severe acute respiratory syndrome coronavirus 2
SASTSAFVETVKG

SEQ ID NO: 21085 - protein, 10 aa, Severe acute respiratory syndrome-related coronavirus
  REGION 1..10: note = Table B: HLA-DPA1*03:01-B1*04:02L HLA-DQA1*05:05-B1*03:19L HLA-DPA1*01:02-B1*04:01L HLA-DRB1*16:01L
  source 1..10: note = Severe acute respiratory syndrome coronavirus 2
GLDYKAFKQI

SEQ ID NO: 21086 - protein, 10 aa, Severe acute respiratory syndrome-related coronavirus
  REGION 1..10: note = Table B: HLA-DPA1*03:01-B1*04:02L HLA-DPA1*03:01-B1*105:01L HLA-DPA1*01:02-B1*04:01L
  source 1..10: note = Severe acute respiratory syndrome coronavirus 2
LDYKAFKQIV

SEQ ID NO: 21087 - protein, 12 aa, Severe acute respiratory syndrome-related coronavirus
  REGION 1..12: note = Table B: HLA-DPA1*03:01-B1*04:02L HLA-DRB1*14:01L HLA-DRB1*12:01L HLA-DQA1*05:05-B1*03:01L HLA-DPA1*01:02-B1*04:01L
  source 1..12: note = Severe acute respiratory syndrome coronavirus 2
GAWNIGEQKSIL

SEQ ID NO: 21088 - protein, 15 aa, Severe acute respiratory syndrome-related coronavirus
  REGION 1..15: note = Table B: HLA-DPA1*03:01-B1*04:02L
  source 1..15: note = Severe acute respiratory syndrome coronavirus 2
TNNLVVMAYITGGVV

SEQ ID NO: 21089 - protein, 11 aa, Severe acute respiratory syndrome-related coronavirus
  REGION 1..11: note = Table B: HLA-DPA1*03:01-B1*04:02L
  source 1..11: note = Severe acute respiratory syndrome coronavirus 2
SQWLTNIFGTV

SEQ ID NO: 21090 - protein, 10 aa, Severe acute respiratory syndrome-related coronavirus
  REGION 1..10: note = Table B: HLA-DPA1*03:01-B1*04:02L HLA-DQA1*01-B1*05L HLA-DPA1*03:01-B1*105:01L HLA-DQA1*03:01-B1*03:02L HLA-DPA1*01:02-B1*04:01L HLA-DRB1*16:01L HLA-DQA1*02:01-B1*03:03L HLA-DRB1*15:03L
  source 1..10: note = Severe acute respiratory syndrome coronavirus 2
VYEKLKPVLD

SEQ ID NO: 21091 - protein, 12 aa, Severe acute respiratory syndrome-related coronavirus
  REGION 1..12: note = Table B: HLA-DPA1*03:01-B1*04:02L HLA-DPA1*03:01-B1*105:01L
  source 1..12: note = Severe acute respiratory syndrome coronavirus 2
VLDWLEEKFKEG

SEQ ID NO: 21092 - protein, 11 aa, Severe acute respiratory syndrome-related coronavirus
  REGION 1..11: note = Table B: HLA-DPA1*03:01-B1*04:02L HLA-DQA1*01-B1*05L
  source 1..11: note = Severe acute respiratory syndrome coronavirus 2
VEFLRDGWEIV

SEQ ID NO: 21093 - protein, 13 aa, Severe acute respiratory syndrome-related coronavirus
  REGION 1..13: note = Table B: HLA-DPA1*03:01-B1*04:02L HLA-DQA1*05:05-B1*03:01L HLA-DQA1*01:03-B1*06:01L
  source 1..13: note = Severe acute respiratory syndrome coronavirus 2
VKFISTCACEIVG

SEQ ID NO: 21094 - protein, 12 aa, Severe acute respiratory syndrome-related coronavirus
  REGION 1..12: note = Table B: HLA-DPA1*03:01-B1*04:02L
  source 1..12: note = Severe acute respiratory syndrome coronavirus 2
SVQTFFKLVNKF

SEQ ID NO: 21095 - protein, 11 aa, Severe acute respiratory syndrome-related coronavirus
  REGION 1..11: note = Table B: HLA-DPA1*03:01-B1*04:02L HLA-DQA1*05:05-B1*03:19L HLA-DPA1*01:03-B1*104:01L HLA-DRB1*16:01L
  source 1..11: note = Severe acute respiratory syndrome coronavirus 2
GETFVTHSKGL

SEQ ID NO: 21096 - protein, 18 aa, Severe acute respiratory syndrome-related coronavirus
  REGION 1..18: note = Table B: HLA-DPA1*03:01-B1*04:02L HLA-DRB1*03:01L HLA-DRB1*11:02L HLA-DPA1*01:03-B1*04:02L HLA-DPA1*01:02-B1*04:01L
  source 1..18: note = Severe acute respiratory syndrome coronavirus 2
PNMMVTNNTFTLKGGAPT

SEQ ID NO: 21097 - protein, 13 aa, Severe acute respiratory syndrome-related coronavirus
  REGION 1..13: note = Table B: HLA-DPA1*03:01-B1*04:02L
  source 1..13: note = Severe acute respiratory syndrome coronavirus 2
DDTVIEVQGYKSV

SEQ ID NO: 21098 - protein, 15 aa, Severe acute respiratory syndrome-related coronavirus
  REGION 1..15: note = Table B: HLA-DPA1*03:01-B1*04:02L HLA-DPA1*01:03-B1*04:02L
  source 1..15: note = Severe acute respiratory syndrome coronavirus 2
TPLGIDLDEWSMATY

SEQ ID NO: 21099 - protein, 13 aa, Severe acute respiratory syndrome-related coronavirus
  REGION 1..13: note = Table B: HLA-DPA1*03:01-B1*04:02L HLA-DPA1*03:01-B1*105:01L
  source 1..13: note = Severe acute respiratory syndrome coronavirus 2
LDEWSMATYYLFD

SEQ ID NO: 21100 - protein, 14 aa, Severe acute respiratory syndrome-related coronavirus
  REGION 1..14: note = Table B: HLA-DPA1*03:01-B1*04:02L HLA-DPA1*03:01-B1*105:01L HLA-DPA1*01:02-B1*04:01L
  source 1..14: note = Severe acute respiratory syndrome coronavirus 2
FKLASHMYCSFYPP

SEQ ID NO: 21101 - protein, 11 aa, Severe acute respiratory syndrome-related coronavirus
  REGION 1..11: note = Table B: HLA-DPA1*03:01-B1*04:02L HLA-DRB1*14:01L HLA-DPA1*03:01-B1*105:01L HLA-DRB1*15:03L
  source 1..11: note = Severe acute respiratory syndrome coronavirus 2
TIVEVQPQLEM

SEQ ID NO: 21102 - protein, 11 aa, Severe acute respiratory syndrome-related coronavirus
  REGION 1..11: note = Table B: HLA-DPA1*03:01-B1*04:02L HLA-DQA1*05:01-B1*02:01L HLA-DRB1*12:01L HLA-DPA1*03:01-B1*105:01L HLA-DRB1*15:03L
  source 1..11: note = Severe acute respiratory syndrome coronavirus 2
IQLLKSAYENF

SEQ ID NO: 21103 - protein, 12 aa, Severe acute respiratory syndrome-related coronavirus
  REGION 1..12: note = Table B: HLA-DPA1*03:01-B1*04:02L HLA-DRB1*14:01L HLA-DPA1*03:01-B1*105:01L
  source 1..12: note = Severe acute respiratory syndrome coronavirus 2
NFNQHEVLLAPL

SEQ ID NO: 21104 - protein, 10 aa, Severe acute respiratory syndrome-related coronavirus
  REGION 1..10: note = Table B: HLA-DPA1*03:01-B1*04:02L HLA-DPA1*03:01-B1*105:01L HLA-DPA1*01:02-B1*04:01L
  source 1..10: note = Severe acute respiratory syndrome coronavirus 2
LVSSFLEMKS

SEQ ID NO: 21105 - protein, 10 aa, Severe acute respiratory syndrome-related coronavirus
  REGION 1..10: note = Table B: HLA-DPA1*03:01-B1*04:02L HLA-DPA1*01:03-B1*04:01L HLA-DPA1*03:01-B1*105:01L HLA-DPA1*01:02-B1*04:01L
  source 1..10: note = Severe acute respiratory syndrome coronavirus 2
TLEETKFLTE

SEQ ID NO: 21106 - protein, 13 aa, Severe acute respiratory syndrome-related coronavirus
  REGION 1..13: note = Table B: HLA-DPA1*03:01-B1*04:02L HLA-DRB1*12:01L HLA-DRB1*15:03L
  source 1..13: note = Severe acute respiratory syndrome coronavirus 2
LGTVSWNLREMLA

SEQ ID NO: 21107 - protein, 14 aa, Severe acute respiratory syndrome-related coronavirus
  REGION 1..14: note = Table B: HLA-DPA1*03:01-B1*04:02L HLA-DRB1*03:01L HLA-DRB1*11:02L HLA-DRB1*11:03L HLA-DRB1*14:02L HLA-DQA1*05:05-B1*03:116L HLA-DPA1*01:03-B1*02:01L HLA-DRB1*08:02L
  source 1..14: note = Severe acute respiratory syndrome coronavirus 2
ARYMRSLKVPATVS

SEQ ID NO: 21108 - protein, 19 aa, Severe acute respiratory syndrome-related coronavirus
  REGION 1..19: note = Table B: HLA-DPA1*03:01-B1*04:02L
  source 1..19: note = Severe acute respiratory syndrome coronavirus 2
IKPHNSHEGKTFYVLPNDD

SEQ ID NO: 21109 - protein, 12 aa, Severe acute respiratory syndrome-related coronavirus
  REGION 1..12: note = Table B: HLA-DPA1*03:01-B1*04:02L HLA-DPA1*03:01-B1*105:01L
  source 1..12: note = Severe acute respiratory syndrome coronavirus 2
RVEAFEYYHTTD

SEQ ID NO: 21110 - protein, 15 aa, Severe acute respiratory syndrome-related coronavirus
  REGION 1..15: note = Table B: HLA-DPA1*03:01-B1*04:02L HLA-DRB1*11:02L HLA-DPA1*03:01-B1*105:01L
  source 1..15: note = Severe acute respiratory syndrome coronavirus 2
SALNHTKKWKYPQVN

SEQ ID NO: 21111 - protein, 12 aa, Severe acute respiratory syndrome-related coronavirus
  REGION 1..12: note = Table B: HLA-DPA1*03:01-B1*04:02L HLA-DRB1*12:01L HLA-DRB1*16:01L
  source 1..12: note = Severe acute respiratory syndrome coronavirus 2
LTSIKWADNNCY

SEQ ID NO: 21112 - protein, 13 aa, Severe acute respiratory syndrome-related coronavirus
  REGION 1..13: note = Table B: HLA-DPA1*03:01-B1*04:02L
  source 1..13: note = Severe acute respiratory syndrome coronavirus 2
DNNCYLATALLTL

SEQ ID NO: 21113 - protein, 10 aa, Severe acute respiratory syndrome-related coronavirus
  REGION 1..10: note = Table B: HLA-DPA1*03:01-B1*04:02L HLA-DPA1*03:01-B1*105:01L HLA-DPA1*01:02-B1*04:01L HLA-DQA1*01:03-B1*06:01L
  source 1..10: note = Severe acute respiratory syndrome coronavirus 2
YLATALLTLQ

SEQ ID NO: 21114 - protein, 12 aa, Severe acute respiratory syndrome-related coronavirus
  REGION 1..12: note = Table B: HLA-DPA1*03:01-B1*04:02L HLA-DQA1*05:01-B1*02:01L HLA-DRB1*12:01L
  source 1..12: note = Severe acute respiratory syndrome coronavirus 2
VMYMGTLSYEQF

SEQ ID NO: 21115 - protein, 11 aa, Severe acute respiratory syndrome-related coronavirus
  REGION 1..11: note = Table B: HLA-DPA1*03:01-B1*04:02L HLA-DPA1*03:01-B1*105:01L HLA-DRB1*16:01L HLA-DRB1*04:08L
  source 1..11: note = Severe acute respiratory syndrome coronavirus 2
NYQCGHYKHIT

SEQ ID NO: 21116 - protein, 16 aa, Severe acute respiratory syndrome-related coronavirus
  REGION 1..16: note = Table B: HLA-DPA1*03:01-B1*04:02L
  source 1..16: note = Severe acute respiratory syndrome coronavirus 2
KHITSKETLYCIDGAL

SEQ ID NO: 21117 - protein, 17 aa, Severe acute respiratory syndrome-related coronavirus
  REGION 1..17: note = Table B: HLA-DPA1*03:01-B1*04:02L
  source 1..17: note = Severe acute respiratory syndrome coronavirus 2
SKETLYCIDGALLTKSS

SEQ ID NO: 21118 - protein, 13 aa, Severe acute respiratory syndrome-related coronavirus
  REGION 1..13: note = Table B: HLA-DPA1*03:01-B1*04:02L HLA-DRB1*15:03L
  source 1..13: note = Severe acute respiratory syndrome coronavirus 2
GPITDVFYKENSY

SEQ ID NO: 21119 - protein, 15 aa, Severe acute respiratory syndrome-related coronavirus
  REGION 1..15: note = Table B: HLA-DPA1*03:01-B1*04:02L
  source 1..15: note = Severe acute respiratory syndrome coronavirus 2
LNQLTGYKKPASREL

SEQ ID NO: 21120 - protein, 10 aa, Severe acute respiratory syndrome-related coronavirus
  REGION 1..10: note = Table B: HLA-DPA1*03:01-B1*04:02L HLA-DPA1*03:01-B1*105:01L HLA-DPA1*01:02-B1*04:01L
  source 1..10: note = Severe acute respiratory syndrome coronavirus 2
ELKVTFFPDL

SEQ ID NO: 21121 - protein, 10 aa, Severe acute respiratory syndrome-related coronavirus
  REGION 1..10: note = Table B: HLA-DPA1*03:01-B1*04:02L HLA-DQA1*01-B1*05L HLA-DPA1*01:03-B1*04:01L HLA-DPA1*03:01-B1*105:01L HLA-DPA1*01:02-B1*04:01L HLA-DQA1*01:03-B1*06:01L
  source 1..10: note = Severe acute respiratory syndrome coronavirus 2
LKVTFFPDLN

SEQ ID NO: 21122 - protein, 12 aa, Severe acute respiratory syndrome-related coronavirus
  REGION 1..12: note = Table B: HLA-DPA1*03:01-B1*04:02L HLA-DPA1*03:01-B1*105:01L HLA-DRB1*15:03L
  source 1..12: note = Severe acute respiratory syndrome coronavirus 2
VAIDYKHYTPSF

SEQ ID NO: 21123 - protein, 17 aa, Severe acute respiratory syndrome-related coronavirus
  REGION 1..17: note = Table B: HLA-DPA1*03:01-B1*04:02L HLA-DPA1*01:03-B1*104:01L HLA-DPA1*01:02-B1*04:01L
  source 1..17: note = Severe acute respiratory syndrome coronavirus 2
KPVETSNSFDVLKSEDA

SEQ ID NO: 21124 - protein, 11 aa, Severe acute respiratory syndrome-related coronavirus
  REGION 1..11: note = Table B: HLA-DPA1*03:01-B1*04:02L HLA-DPA1*01:03-B1*04:01L HLA-DPA1*02:01-B1*13:01L
  source 1..11: note = Severe acute respiratory syndrome coronavirus 2
VVENPTIQKDV

SEQ ID NO: 21125 - protein, 12 aa, Severe acute respiratory syndrome-related coronavirus
  REGION 1..12: note = Table B: HLA-DPA1*03:01-B1*04:02L HLA-DQA1*01-B1*05L HLA-DQA1*05:01-B1*02:01L HLA-DPA1*01:03-B1*04:01L HLA-DPA1*01:03-B1*04:02L HLA-DPA1*01:02-B1*04:01L HLA-DRB1*16:01L
  source 1..12: note = Severe acute respiratory syndrome coronavirus 2
AAVNSVPWDTIA

SEQ ID NO: 21126 - protein, 12 aa, Severe acute respiratory syndrome-related coronavirus
  REGION 1..12: note = Table B: HLA-DPA1*03:01-B1*04:02L HLA-DRB1*12:01L
  source 1..12: note = Severe acute respiratory syndrome coronavirus 2
VNSVPWDTIANY

SEQ ID NO: 21127 - protein, 11 aa, Severe acute respiratory syndrome-related coronavirus
  REGION 1..11: note = Table B: HLA-DPA1*03:01-B1*04:02L
  source 1..11: note = Severe acute respiratory syndrome coronavirus 2
TNYMPYFFTLL

SEQ ID NO: 21128 - protein, 11 aa, Severe acute respiratory syndrome-related coronavirus
  REGION 1..11: note = Table B: HLA-DPA1*03:01-B1*04:02L HLA-DPA1*03:01-B1*105:01L
  source 1..11: note = Severe acute respiratory syndrome coronavirus 2
MPYFFTLLLQL

SEQ ID NO: 21129 - protein, 11 aa, Severe acute respiratory syndrome-related coronavirus
  REGION 1..11: note = Table B: HLA-DPA1*03:01-B1*04:02L
  source 1..11: note = Severe acute respiratory syndrome coronavirus 2
TFTRSTNSRIK

SEQ ID NO: 21130 - protein, 13 aa, Severe acute respiratory syndrome-related coronavirus
  REGION 1..13: note = Table B: HLA-DPA1*03:01-B1*04:02L
  source 1..13: note = Severe acute respiratory syndrome coronavirus 2
VGKFCLEASFNYL

SEQ ID NO: 21131 - protein, 11 aa, Severe acute respiratory syndrome-related coronavirus
  REGION 1..11: note = Table B: HLA-DPA1*03:01-B1*04:02L HLA-DQA1*01-B1*05L HLA-DPA1*03:01-B1*105:01L HLA-DQA1*01:03-B1*06:01L
  source 1..11: note = Severe acute respiratory syndrome coronavirus 2
ITISSFKWDLT

SEQ ID NO: 21132 - protein, 11 aa, Severe acute respiratory syndrome-related coronavirus
  REGION 1..11: note = Table B: HLA-DPA1*03:01-B1*04:02L HLA-DPA1*03:01-B1*105:01L HLA-DPA1*01:02-B1*04:01L
  source 1..11: note = Severe acute respiratory syndrome coronavirus 2
FKWDLTAFGLV

SEQ ID NO: 21133 - protein, 11 aa, Severe acute respiratory syndrome-related coronavirus
  REGION 1..11: note = Table B: HLA-DPA1*03:01-B1*04:02L HLA-DPA1*01:03-B1*04:01L HLA-DPA1*01:03-B1*04:02L HLA-DPA1*03:01-B1*105:01L HLA-DPA1*01:02-B1*04:01L HLA-DRB1*16:01L
  source 1..11: note = Severe acute respiratory syndrome coronavirus 2
KWDLTAFGLVA

SEQ ID NO: 21134 - protein, 11 aa, Severe acute respiratory syndrome-related coronavirus
  REGION 1..11: note = Table B: HLA-DPA1*03:01-B1*04:02L HLA-DPA1*03:01-B1*105:01L HLA-DPA1*01:02-B1*04:01L HLA-DQA1*01:03-B1*06:01L
  source 1..11: note = Severe acute respiratory syndrome coronavirus 2
WDLTAFGLVAE

SEQ ID NO: 21135 - protein, 10 aa, Severe acute respiratory syndrome-related coronavirus
  REGION 1..10: note = Table B: HLA-DPA1*03:01-B1*04:02L HLA-DPA1*03:01-B1*105:01L HLA-DPA1*01:02-B1*04:01L
  source 1..10: note = Severe acute respiratory syndrome coronavirus 2
WFLAYILFTR

SEQ ID NO: 21136 - protein, 10 aa, Severe acute respiratory syndrome-related coronavirus
  REGION 1..10: note = Table B: HLA-DPA1*03:01-B1*04:02L HLA-DPA1*02:01-B1*13:01L HLA-DPA1*03:01-B1*105:01L HLA-DPA1*01:02-B1*04:01L HLA-DQA1*01:03-B1*06:01L HLA-DRB1*15:03L
  source 1..10: note = Severe acute respiratory syndrome coronavirus 2
ILFTRFFYVL

SEQ ID NO: 21137 - protein, 12 aa, Severe acute respiratory syndrome-related coronavirus
  REGION 1..12: note = Table B: HLA-DPA1*03:01-B1*04:02L HLA-DPA1*03:01-B1*105:01L HLA-DRB1*15:03L
  source 1..12: note = Severe acute respiratory syndrome coronavirus 2
IMQLFFSYFAVH

SEQ ID NO: 21138 - protein, 10 aa, Severe acute respiratory syndrome-related coronavirus
  REGION 1..10: note = Table B: HLA-DPA1*03:01-B1*04:02L HLA-DPA1*03:01-B1*105:01L HLA-DPA1*01:02-B1*04:01L
  source 1..10: note = Severe acute respiratory syndrome coronavirus 2
YFAVHFISNS

SEQ ID NO: 21139 - protein, 11 aa, Severe acute respiratory syndrome-related coronavirus
  REGION 1..11: note = Table B: HLA-DPA1*03:01-B1*04:02L
  source 1..11: note = Severe acute respiratory syndrome coronavirus 2
VHFISNSWLMW

SEQ ID NO: 21140 - protein, 10 aa, Severe acute respiratory syndrome-related coronavirus
  REGION 1..10: note = Table B: HLA-DPA1*03:01-B1*04:02L
  source 1..10: note = Severe acute respiratory syndrome coronavirus 2
FISNSWLMWL

SEQ ID NO: 21141 - protein, 11 aa, Severe acute respiratory syndrome-related coronavirus
  REGION 1..11: note = Table B: HLA-DPA1*03:01-B1*04:02L HLA-DPA1*01:03-B1*04:02L
  source 1..11: note = Severe acute respiratory syndrome coronavirus 2
IFFASFYYVWK

SEQ ID NO: 21142 - protein, 10 aa, Severe acute respiratory syndrome-related coronavirus
  REGION 1..10: note = Table B: HLA-DPA1*03:01-B1*04:02L HLA-DPA1*01:03-B1*04:01L HLA-DPA1*03:01-B1*105:01L HLA-DPA1*01:02-B1*04:01L HLA-DRB1*16:01L HLA-DQA1*01:03-B1*06:01L
  source 1..10: note = Severe acute respiratory syndrome coronavirus 2
YVWKSYVHVV

SEQ ID NO: 21143 - protein, 16 aa, Severe acute respiratory syndrome-related coronavirus
  REGION 1..16: note = Table B: HLA-DPA1*03:01-B1*04:02L
  source 1..16: note = Severe acute respiratory syndrome coronavirus 2
YERHSLSHFVNLDNLR

SEQ ID NO: 21144 - protein, 15 aa, Severe acute respiratory syndrome-related coronavirus
  REGION 1..15: note = Table B: HLA-DPA1*03:01-B1*04:02L HLA-DRB1*11:01L
  source 1..15: note = Severe acute respiratory syndrome coronavirus 2
LPINVIVFDGKSKCE

SEQ ID NO: 21145 - protein, 13 aa, Severe acute respiratory syndrome-related coronavirus
  REGION 1..13: note = Table B: HLA-DPA1*03:01-B1*04:02L HLA-DPA1*03:01-B1*105:01L
  source 1..13: note = Severe acute respiratory syndrome coronavirus 2
YSQLMCQPILLLD

SEQ ID NO: 21146 - protein, 13 aa, Severe acute respiratory syndrome-related coronavirus
  REGION 1..13: note = Table B: HLA-DPA1*03:01-B1*04:02L HLA-DPA1*01:02-B1*04:01L HLA-DQA1*01:03-B1*06:01L
  source 1..13: note = Severe acute respiratory syndrome coronavirus 2
SQLMCQPILLLDQ

SEQ ID NO: 21147 - protein, 11 aa, Severe acute respiratory syndrome-related coronavirus
  REGION 1..11: note = Table B: HLA-DPA1*03:01-B1*04:02L HLA-DRB1*14:01L HLA-DRB1*12:01L
  source 1..11: note = Severe acute respiratory syndrome coronavirus 2
STFISAARQGF

SEQ ID NO: 21148 - protein, 13 aa, Severe acute respiratory syndrome-related coronavirus
  REGION 1..13: note = Table B: HLA-DPA1*03:01-B1*04:02L
  source 1..13: note = Severe acute respiratory syndrome coronavirus 2
SAARQGFVDSDVE

SEQ ID NO: 21149 - protein, 12 aa, Severe acute respiratory syndrome-related coronavirus
  REGION 1..12: note = Table B: HLA-DPA1*03:01-B1*04:02L HLA-DPA1*03:01-B1*105:01L HLA-DRB1*15:03L
  source 1..12: note = Severe acute respiratory syndrome coronavirus 2
YMLTYNKVENMT

SEQ ID NO: 21150 - protein, 10 aa, Severe acute respiratory syndrome-related coronavirus
  REGION 1..10: note = Table B: HLA-DPA1*03:01-B1*04:02L HLA-DPA1*01:02-B1*04:01L
  source 1..10: note = Severe acute respiratory syndrome coronavirus 2
WNVKDFMSLS

SEQ ID NO: 21151 - protein, 12 aa, Severe acute respiratory syndrome-related coronavirus
  REGION 1..12: note = Table B: HLA-DPA1*03:01-B1*04:02L HLA-DRB1*14:01L HLA-DRB1*12:01L HLA-DRB1*16:01L
  source 1..12: note = Severe acute respiratory syndrome coronavirus 2
GGKIVNNWLKQL

SEQ ID NO: 21152 - protein, 14 aa, Severe acute respiratory syndrome-related coronavirus
  REGION 1..14: note = Table B: HLA-DPA1*03:01-B1*04:02L
  source 1..14: note = Severe acute respiratory syndrome coronavirus 2
VITREVGFVVPGLP

SEQ ID NO: 21153 - protein, 13 aa, Severe acute respiratory syndrome-related coronavirus
  REGION 1..13: note = Table B: HLA-DPA1*03:01-B1*04:02L HLA-DRB1*12:01L HLA-DQA1*03:01-B1*03:02L
  source 1..13: note = Severe acute respiratory syndrome coronavirus 2
TNGDFLHFLPRVF

SEQ ID NO: 21154 - protein, 12 aa, Severe acute respiratory syndrome-related coronavirus
  REGION 1..12: note = Table B: HLA-DPA1*03:01-B1*04:02L HLA-DPA1*03:01-B1*105:01L
  source 1..12: note = Severe acute respiratory syndrome coronavirus 2
FLPRVFSAVGNI

SEQ ID NO: 21155 - protein, 11 aa, Severe acute respiratory syndrome-related coronavirus
  REGION 1..11: note = Table B: HLA-DPA1*03:01-B1*04:02L HLA-DPA1*01:02-B1*04:01L
  source 1..11: note = Severe acute respiratory syndrome coronavirus 2
NICYTPSKLIE

SEQ ID NO: 21156 - protein, 12 aa, Severe acute respiratory syndrome-related coronavirus
  REGION 1..12: note = Table B: HLA-DPA1*03:01-B1*04:02L
  source 1..12: note = Severe acute respiratory syndrome coronavirus 2
ICYTPSKLIEYT

SEQ ID NO: 21157 - protein, 12 aa, Severe acute respiratory syndrome-related coronavirus
  REGION 1..12: note = Table B: HLA-DPA1*03:01-B1*04:02L HLA-DQA1*01:01-B1*05:01L HLA-DRB1*08:01L HLA-DPA1*01:03-B1*04:02L HLA-DRB1*12:01L HLA-DQA1*05:05-B1*03:01L HLA-DRB1*04:08L
  source 1..12: note = Severe acute respiratory syndrome coronavirus 2
GSVAYESLRPDT

SEQ ID NO: 21158 - protein, 13 aa, Severe acute respiratory syndrome-related coronavirus
  REGION 1..13: note = Table B: HLA-DPA1*03:01-B1*04:02L HLA-DPA1*03:01-B1*105:01L HLA-DPA1*01:02-B1*04:01L HLA-DRB1*04:08L HLA-DRB1*15:03L
  source 1..13: note = Severe acute respiratory syndrome coronavirus 2
GRWVLNNDYYRSL

SEQ ID NO: 21159 - protein, 12 aa, Severe acute respiratory syndrome-related coronavirus
  REGION 1..12: note = Table B: HLA-DPA1*03:01-B1*04:02L HLA-DPA1*01:03-B1*04:01L HLA-DPA1*01:03-B1*04:02L HLA-DPA1*03:01-B1*105:01L HLA-DPA1*01:02-B1*04:01L HLA-DRB1*16:01L HLA-DQA1*01:03-B1*06:01L HLA-DRB1*15:03L
  source 1..12: note = Severe acute respiratory syndrome coronavirus 2
WVLNNDYYRSLP

SEQ ID NO: 21160 - protein, 12 aa, Severe acute respiratory syndrome-related coronavirus
  REGION 1..12: note = Table B: HLA-DPA1*03:01-B1*04:02L HLA-DPA1*03:01-B1*105:01L HLA-DPA1*01:02-B1*04:01L HLA-DQA1*01:03-B1*06:01L
  source 1..12: note = Severe acute respiratory syndrome coronavirus 2
LLTNMFTPLIQP

SEQ ID NO: 21161 - protein, 12 aa, Severe acute respiratory syndrome-related coronavirus
  REGION 1..12: note = Table B: HLA-DPA1*03:01-B1*04:02L HLA-DPA1*03:01-B1*105:01L
  source 1..12: note = Severe acute respiratory syndrome coronavirus 2
VVAFNTLLFLMS

SEQ ID NO: 21162 - protein, 13 aa, Severe acute respiratory syndrome-related coronavirus
  REGION 1..13: note = Table B: HLA-DPA1*03:01-B1*04:02L
  source 1..13: note = Severe acute respiratory syndrome coronavirus 2
LMSFTVLCLTPVY

SEQ ID NO: 21163 - protein, 13 aa, Severe acute respiratory syndrome-related coronavirus
  REGION 1..13: note = Table B: HLA-DPA1*03:01-B1*04:02L HLA-DPA1*01:03-B1*04:01L HLA-DPA1*01:03-B1*04:02L HLA-DPA1*01:02-B1*04:01L
  source 1..13: note = Severe acute respiratory syndrome coronavirus 2
LPGVYSVIYLYLT

SEQ ID NO: 21164 - protein, 12 aa, Severe acute respiratory syndrome-related coronavirus
  REGION 1..12: note = Table B: HLA-DPA1*03:01-B1*04:02L HLA-DPA1*03:01-B1*105:01L
  source 1..12: note = Severe acute respiratory syndrome coronavirus 2
AHIQWMVMFTPL

SEQ ID NO: 21165 - protein, 13 aa, Severe acute respiratory syndrome-related coronavirus
  REGION 1..13: note = Table B: HLA-DPA1*03:01-B1*04:02L HLA-DRB1*15:03L
  source 1..13: note = Severe acute respiratory syndrome coronavirus 2
HIQWMVMFTPLVP

SEQ ID NO: 21166 - protein, 11 aa, Severe acute respiratory syndrome-related coronavirus
  REGION 1..11: note = Table B: HLA-DPA1*03:01-B1*04:02L HLA-DPA1*03:01-B1*105:01L HLA-DRB1*15:03L
  source 1..11: note = Severe acute respiratory syndrome coronavirus 2
WMVMFTPLVPF

SEQ ID NO: 21167 - protein, 12 aa, Severe acute respiratory syndrome-related coronavirus
  REGION 1..12: note = Table B: HLA-DPA1*03:01-B1*04:02L HLA-DQA1*01-B1*05L HLA-DRB1*15:03L
  source 1..12: note = Severe acute respiratory syndrome coronavirus 2
TKHFYWFFSNYL

SEQ ID NO: 21168 - protein, 11 aa, Severe acute respiratory syndrome-related coronavirus
  REGION 1..11: note = Table B: HLA-DPA1*03:01-B1*04:02L
  source 1..11: note = Severe acute respiratory syndrome coronavirus 2
VFNGVSFSTFE

SEQ ID NO: 21169 - protein, 11 aa, Severe acute respiratory syndrome-related coronavirus
  REGION 1..11: note = Table B: HLA-DPA1*03:01-B1*04:02L HLA-DQA1*01-B1*05L HLA-DPA1*01:03-B1*04:01L HLA-DPA1*03:01-B1*105:01L HLA-DPA1*01:02-B1*04:01L HLA-DQA1*01:03-B1*06:01L
  source 1..11: note = Severe acute respiratory syndrome coronavirus 2
NGVSFSTFEEA

SEQ ID NO: 21170 - protein, 10 aa, Severe acute respiratory syndrome-related coronavirus
  REGION 1..10: note = Table B: HLA-DPA1*03:01-B1*04:02L HLA-DPA1*01:02-B1*04:01L
  source 1..10: note = Severe acute respiratory syndrome coronavirus 2
LLNKEMYLKL

SEQ ID NO: 21171 - protein, 12 aa, Severe acute respiratory syndrome-related coronavirus
  REGION 1..12: note = Table B: HLA-DPA1*03:01-B1*04:02L HLA-DPA1*03:01-B1*105:01L HLA-DRB1*16:01L HLA-DRB1*15:03L
  source 1..12: note = Severe acute respiratory syndrome coronavirus 2
YLKLRSDVLLPL

SEQ ID NO: 21172 - protein, 12 aa, Severe acute respiratory syndrome-related coronavirus
  REGION 1..12: note = Table B: HLA-DPA1*03:01-B1*04:02L HLA-DRB1*16:01L HLA-DQA1*01:03-B1*06:01L HLA-DRB1*04:08L
  source 1..12: note = Severe acute respiratory syndrome coronavirus 2
LKLRSDVLLPLT

SEQ ID NO: 21173 - protein, 16 aa, Severe acute respiratory syndrome-related coronavirus
  REGION 1..16: note = Table B: HLA-DPA1*03:01-B1*04:02L HLA-DRB1*14:02L HLA-DQA1*05:05-B1*03:01L
  source 1..16: note = Severe acute respiratory syndrome coronavirus 2
DTTSYREAACCHLAKA

SEQ ID NO: 21174 - protein, 12 aa, Severe acute respiratory syndrome-related coronavirus
  REGION 1..12: note = Table B: HLA-DPA1*03:01-B1*04:02L HLA-DPA1*02:01-B1*13:01L
  source 1..12: note = Severe acute respiratory syndrome coronavirus 2
MLNPNYEDLLIR

SEQ ID NO: 21175 - protein, 16 aa, Severe acute respiratory syndrome-related coronavirus
  REGION 1..16: note = Table B: HLA-DPA1*03:01-B1*04:02L HLA-DQA1*05:05-B1*03:19L
  source 1..16: note = Severe acute respiratory syndrome coronavirus 2
YEDLLIRKSNHNFLVQ

SEQ ID NO: 21176 - protein, 15 aa, Severe acute respiratory syndrome-related coronavirus
  REGION 1..15: note = Table B: HLA-DPA1*03:01-B1*04:02L HLA-DRB1*11:02L HLA-DRB4*02:01NL HLA-DRB4*01:01L HLA-DRB1*09:01L HLA-DRB1*07:01L HLA-DRB1*15:01L
  source 1..15: note = Severe acute respiratory syndrome coronavirus 2
VLKLKVDTANPKTPK

SEQ ID NO: 21177 - protein, 18 aa, Severe acute respiratory syndrome-related coronavirus
  REGION 1..18: note = Table B: HLA-DPA1*03:01-B1*04:02L
  source 1..18: note = Severe acute respiratory syndrome coronavirus 2
IQPGQTFSVLACYNGSPS

SEQ ID NO: 21178 - protein, 11 aa, Severe acute respiratory syndrome-related coronavirus
  REGION 1..11: note = Table B: HLA-DPA1*03:01-B1*04:02L HLA-DPA1*03:01-B1*105:01L
  source 1..11: note = Severe acute respiratory syndrome coronavirus 2
IDYDCVSFCYM

SEQ ID NO: 21179 - protein, 14 aa, Severe acute respiratory syndrome-related coronavirus
  REGION 1..14: note = Table B: HLA-DPA1*03:01-B1*04:02L HLA-DPA1*01:03-B1*04:02L HLA-DPA1*02:01-B1*13:01L HLA-DPA1*01:02-B1*04:01L HLA-DRB1*16:01L HLA-DQA1*02:01-B1*03:03L HLA-DRB1*15:03L
  source 1..14: note = Severe acute respiratory syndrome coronavirus 2
GTDLEGNFYGPFVD

SEQ ID NO: 21180 - protein, 13 aa, Severe acute respiratory syndrome-related coronavirus
  REGION 1..13: note = Table B: HLA-DPA1*03:01-B1*04:02L
  source 1..13: note = Severe acute respiratory syndrome coronavirus 2
NRFTTTLNDFNLV

SEQ ID NO: 21181 - protein, 14 aa, Severe acute respiratory syndrome-related coronavirus
  REGION 1..14: note = Table B: HLA-DPA1*03:01-B1*04:02L HLA-DRB1*11:01L HLA-DQA1*05:05-B1*03:116L HLA-DPA1*01:03-B1*04:02L HLA-DPA1*02:01-B1*13:01L HLA-DPA1*01:03-B1*104:01L
  source 1..14: note = Severe acute respiratory syndrome coronavirus 2
GPLSAQTGIAVLDM

SEQ ID NO: 21182 - protein, 13 aa, Severe acute respiratory syndrome-related coronavirus
  REGION 1..13: note = Table B: HLA-DPA1*03:01-B1*04:02L HLA-DPA1*01:02-B1*04:01L HLA-DQA1*01:03-B1*06:01L
  source 1..13: note = Severe acute respiratory syndrome coronavirus 2
NGRTILGSALLED

SEQ ID NO: 21183 - protein, 12 aa, Severe acute respiratory syndrome-related coronavirus
  REGION 1..12: note = Table B: HLA-DPA1*03:01-B1*04:02L HLA-DQA1*05:05-B1*03:19L HLA-DQA1*05:05-B1*03:01L HLA-DRB1*15:03L
  source 1..12: note = Severe acute respiratory syndrome coronavirus 2
TILGSALLEDEF

SEQ ID NO: 21184 - protein, 12 aa, Severe acute respiratory syndrome-related coronavirus
  REGION 1..12: note = Table B: HLA-DPA1*03:01-B1*04:02L HLA-DPA1*01:03-B1*04:01L HLA-DPA1*01:02-B1*04:01L HLA-DQA1*01:03-B1*06:01L
  source 1..12: note = Severe acute respiratory syndrome coronavirus 2
GSALLEDEFTPF

SEQ ID NO: 21185 - protein, 12 aa, Severe acute respiratory syndrome-related coronavirus
  REGION 1..12: note = Table B: HLA-DPA1*03:01-B1*04:02L HLA-DPA1*03:01-B1*105:01L
  source 1..12: note = Severe acute respiratory syndrome coronavirus 2
LLEDEFTPFDVV

SEQ ID NO: 21186 - protein, 13 aa, Severe acute respiratory syndrome-related coronavirus
  REGION 1..13: note = Table B: HLA-DPA1*03:01-B1*04:02L HLA-DPA1*03:01-B1*105:01L
  source 1..13: note = Severe acute respiratory syndrome coronavirus 2
THHWLLLTILTSL

SEQ ID NO: 21187 - protein, 14 aa, Severe acute respiratory syndrome-related coronavirus
  REGION 1..14: note = Table B: HLA-DPA1*03:01-B1*04:02L HLA-DPA1*01:03-B1*04:02L
  source 1..14: note = Severe acute respiratory syndrome coronavirus 2
TILTSLLVLVQSTQ

SEQ ID NO: 21188 - protein, 12 aa, Severe acute respiratory syndrome-related coronavirus
  REGION 1..12: note = Table B: HLA-DPA1*03:01-B1*04:02L
  source 1..12: note = Severe acute respiratory syndrome coronavirus 2
TSLLVLVQSTQW

SEQ ID NO: 21189 - protein, 13 aa, Severe acute respiratory syndrome-related coronavirus
  REGION 1..13: note = Table B: HLA-DPA1*03:01-B1*04:02L
  source 1..13: note = Severe acute respiratory syndrome coronavirus 2
YENAFLPFAMGII

SEQ ID NO: 21190 - protein, 12 aa, Severe acute respiratory syndrome-related coronavirus
  REGION 1..12: note = Table B: HLA-DPA1*03:01-B1*04:02L
  source 1..12: note = Severe acute respiratory syndrome coronavirus 2
NAFLPFAMGIIA

SEQ ID NO: 21191 - protein, 15 aa, Severe acute respiratory syndrome-related coronavirus
  REGION 1..15: note = Table B: HLA-DPA1*03:01-B1*04:02L HLA-DRB1*14:02L
  source 1..15: note = Severe acute respiratory syndrome coronavirus 2
SAFAMMFVKHKHAFL

SEQ ID NO: 21192 - protein, 13 aa, Severe acute respiratory syndrome-related coronavirus
  REGION 1..13: note = Table B: HLA-DPA1*03:01-B1*04:02L
  source 1..13: note = Severe acute respiratory syndrome coronavirus 2
KHAFLCLFLLPSL

SEQ ID NO: 21193 - protein, 14 aa, Severe acute respiratory syndrome-related coronavirus
  REGION 1..14: note = Table B: HLA-DPA1*03:01-B1*04:02L HLA-DRB1*14:01L HLA-DRB1*12:01L
  source 1..14: note = Severe acute respiratory syndrome coronavirus 2
LATVAYFNMVYMPA

SEQ ID NO: 21194 - protein, 12 aa, Severe acute respiratory syndrome-related coronavirus
  REGION 1..12: note = Table B: HLA-DPA1*03:01-B1*04:02L HLA-DQA1*05:01-B1*02:01L
  source 1..12: note = Severe acute respiratory syndrome coronavirus 2
MPASWVMRIMTW

SEQ ID NO: 21195 - protein, 12 aa, Severe acute respiratory syndrome-related coronavirus
  REGION 1..12: note = Table B: HLA-DPA1*03:01-B1*04:02L HLA-DPA1*03:01-B1*105:01L
  source 1..12: note = Severe acute respiratory syndrome coronavirus 2
VMRIMTWLDMVD

SEQ ID NO: 21196 - protein, 12 aa, Severe acute respiratory syndrome-related coronavirus
  REGION 1..12: note = Table B: HLA-DPA1*03:01-B1*04:02L HLA-DRB1*12:01L HLA-DPA1*03:01-B1*105:01L HLA-DPA1*01:02-B1*04:01L HLA-DRB1*15:03L
  source 1..12: note = Severe acute respiratory syndrome coronavirus 2
VLTLVYKVYYGN

SEQ ID NO: 21197 - protein, 12 aa, Severe acute respiratory syndrome-related coronavirus
  REGION 1..12: note = Table B: HLA-DPA1*03:01-B1*04:02L HLA-DPA1*03:01-B1*105:01L
  source 1..12: note = Severe acute respiratory syndrome coronavirus 2
LTLVYKVYYGNA

SEQ ID NO: 21198 - protein, 12 aa, Severe acute respiratory syndrome-related coronavirus
  REGION 1..12: note = Table B: HLA-DPA1*03:01-B1*04:02L
  source 1..12: note = Severe acute respiratory syndrome coronavirus 2
KVYYGNALDQAI

SEQ ID NO: 21199 - protein, 12 aa, Severe acute respiratory syndrome-related coronavirus
  REGION 1..12: note = Table B: HLA-DPA1*03:01-B1*04:02L
  source 1..12: note = Severe acute respiratory syndrome coronavirus 2
GIVFMCVEYCPI

SEQ ID NO: 21200 - protein, 12 aa, Severe acute respiratory syndrome-related coronavirus
  REGION 1..12: note = Table B: HLA-DPA1*03:01-B1*04:02L HLA-DPA1*03:01-B1*105:01L
  source 1..12: note = Severe acute respiratory syndrome coronavirus 2
IVFMCVEYCPIF

SEQ ID NO: 21201 - protein, 18 aa, Severe acute respiratory syndrome-related coronavirus
  REGION 1..18: note = Table B: HLA-DPA1*03:01-B1*04:02L HLA-DRB1*14:02L HLA-DPA1*01:03-B1*04:02L
  source 1..18: note = Severe acute respiratory syndrome coronavirus 2
LPPKNSIDAFKLNIKLLG

SEQ ID NO: 21202 - protein, 15 aa, Severe acute respiratory syndrome-related coronavirus
  REGION 1..15: note = Table B: HLA-DPA1*03:01-B1*04:02L HLA-DQA1*05:05-B1*03:19L HLA-DPA1*01:03-B1*04:02L HLA-DQA1*02:01-B1*03:03L HLA-DRB1*15:03L
  source 1..15: note = Severe acute respiratory syndrome coronavirus 2
SKLWAQCVQLHNDIL

SEQ ID NO: 21203 - protein, 10 aa, Severe acute respiratory syndrome-related coronavirus
  REGION 1..10: note = Table B: HLA-DPA1*03:01-B1*04:02L HLA-DQA1*01-B1*05L HLA-DPA1*03:01-B1*105:01L HLA-DPA1*01:02-B1*04:01L HLA-DQA1*01:03-B1*06:01L
  source 1..10: note = Severe acute respiratory syndrome coronavirus 2
TTEAFEKMVS

SEQ ID NO: 21204 - protein, 13 aa, Severe acute respiratory syndrome-related coronavirus
  REGION 1..13: note = Table B: HLA-DPA1*03:01-B1*04:02L HLA-DPA1*01:02-B1*04:01L
  source 1..13: note = Severe acute respiratory syndrome coronavirus 2
QGAVDINKLCEEM

SEQ ID NO: 21205 - protein, 12 aa, Severe acute respiratory syndrome-related coronavirus
  REGION 1..12: note = Table B: HLA-DPA1*03:01-B1*04:02L HLA-DPA1*03:01-B1*105:01L HLA-DPA1*01:02-B1*04:01L HLA-DQA1*01:03-B1*06:01L
  source 1..12: note = Severe acute respiratory syndrome coronavirus 2
AIASEFSSLPSY

SEQ ID NO: 21206 - protein, 15 aa, Severe acute respiratory syndrome-related coronavirus
  REGION 1..15: note = Table B: HLA-DPA1*03:01-B1*04:02L
  source 1..15: note = Severe acute respiratory syndrome coronavirus 2
TAQEAYEQAVANGDS

SEQ ID NO: 21207 - protein, 15 aa, Severe acute respiratory syndrome-related coronavirus
  REGION 1..15: note = Table B: HLA-DPA1*03:01-B1*04:02L HLA-DRB1*03:01L
  source 1..15: note = Severe acute respiratory syndrome coronavirus 2
AQEAYEQAVANGDSE

SEQ ID NO: 21208 - protein, 16 aa, Severe acute respiratory syndrome-related coronavirus
  REGION 1..16: note = Table B: HLA-DPA1*03:01-B1*04:02L HLA-DQA1*05:05-B1*03:116L
  source 1..16: note = Severe acute respiratory syndrome coronavirus 2
QEAYEQAVANGDSEVV

SEQ ID NO: 21209 - protein, 16 aa, Severe acute respiratory syndrome-related coronavirus
  REGION 1..16: note = Table B: HLA-DPA1*03:01-B1*04:02L HLA-DRB1*14:02L HLA-DQA1*05:05-B1*03:19L HLA-DRB1*13:01L HLA-DPA1*01:03-B1*04:02L HLA-DPA1*01:03-B1*02:01L
  source 1..16: note = Severe acute respiratory syndrome coronavirus 2
DSEVVLKKLKKSLNVA

SEQ ID NO: 21210 - protein, 18 aa, Severe acute respiratory syndrome-related coronavirus
  REGION 1..18: note = Table B: HLA-DPA1*03:01-B1*04:02L HLA-DRB1*14:02L HLA-DQA1*05:05-B1*03:19L HLA-DPA1*01:03-B1*04:02L
  source 1..18: note = Severe acute respiratory syndrome coronavirus 2
SEVVLKKLKKSLNVAKSE

SEQ ID NO: 21211 - protein, 17 aa, Severe acute respiratory syndrome-related coronavirus
  REGION 1..17: note = Table B: HLA-DPA1*03:01-B1*04:02L HLA-DRB1*03:01L HLA-DRB1*09:01L HLA-DPA1*01:03-B1*04:02L HLA-DPA1*01:02-B1*04:01L
  source 1..17: note = Severe acute respiratory syndrome coronavirus 2
LKKSLNVAKSEFDRDAA

SEQ ID NO: 21212 - protein, 11 aa, Severe acute respiratory syndrome-related coronavirus
  REGION 1..11: note = Table B: HLA-DPA1*03:01-B1*04:02L
  source 1..11: note = Severe acute respiratory syndrome coronavirus 2
SAMQTMLFTML

SEQ ID NO: 21213 - protein, 11 aa, Severe acute respiratory syndrome-related coronavirus
  REGION 1..11: note = Table B: HLA-DPA1*03:01-B1*04:02L HLA-DPA1*01:03-B1*04:02L
  source 1..11: note = Severe acute respiratory syndrome coronavirus 2
AMQTMLFTMLR

SEQ ID NO: 21214 - protein, 10 aa, Severe acute respiratory syndrome-related coronavirus
  REGION 1..10: note = Table B: HLA-DPA1*03:01-B1*04:02L HLA-DPA1*01:02-B1*04:01L
  source 1..10: note = Severe acute respiratory syndrome coronavirus 2
TMLFTMLRKL

SEQ ID NO: 21215 - protein, 15 aa, Severe acute respiratory syndrome-related coronavirus
  REGION 1..15: note = Table B: HLA-DPA1*03:01-B1*04:02L HLA-DRB1*14:02L HLA-DRB1*11:01L HLA-DRB4*01:01L
  source 1..15: note = Severe acute respiratory syndrome coronavirus 2
DNDALNNIINNARDG

SEQ ID NO: 21216 - protein, 12 aa, Severe acute respiratory syndrome-related coronavirus
  REGION 1..12: note = Table B: HLA-DPA1*03:01-B1*04:02L HLA-DQA1*05:05-B1*03:19L HLA-DPA1*01:03-B1*04:02L HLA-DQA1*05:05-B1*03:01L
  source 1..12: note = Severe acute respiratory syndrome coronavirus 2
TFTYASALWEIQ

SEQ ID NO: 21217 - protein, 13 aa, Severe acute respiratory syndrome-related coronavirus
  REGION 1..13: note = Table B: HLA-DPA1*03:01-B1*04:02L HLA-DQA1*05:01-B1*02:01L HLA-DRB1*09:01L
  source 1..13: note = Severe acute respiratory syndrome coronavirus 2
IVTALRANSAVKL

SEQ ID NO: 21218 - protein, 11 aa, Severe acute respiratory syndrome-related coronavirus
  REGION 1..11: note = Table B: HLA-DPA1*03:01-B1*04:02L HLA-DPA1*03:01-B1*105:01L HLA-DPA1*01:02-B1*04:01L
  source 1..11: note = Severe acute respiratory syndrome coronavirus 2
RFVLALLSDLQ

SEQ ID NO: 21219 - protein, 13 aa, Severe acute respiratory syndrome-related coronavirus
  REGION 1..13: note = Table B: HLA-DPA1*03:01-B1*04:02L
  source 1..13: note = Severe acute respiratory syndrome coronavirus 2
FVLALLSDLQDLK

SEQ ID NO: 21220 - protein, 12 aa, Severe acute respiratory syndrome-related coronavirus
  REGION 1..12: note = Table B: HLA-DPA1*03:01-B1*04:02L HLA-DPA1*03:01-B1*105:01L HLA-DRB1*16:01L
  source 1..12: note = Severe acute respiratory syndrome coronavirus 2
SDLQDLKWARFP

SEQ ID NO: 21221 - protein, 13 aa, Severe acute respiratory syndrome-related coronavirus
  REGION 1..13: note = Table B: HLA-DPA1*03:01-B1*04:02L HLA-DPA1*03:01-B1*105:01L
  source 1..13: note = Severe acute respiratory syndrome coronavirus 2
DLQDLKWARFPKS

SEQ ID NO: 21222 - protein, 16 aa, Severe acute respiratory syndrome-related coronavirus
  REGION 1..16: note = Table B: HLA-DPA1*03:01-B1*04:02L
  source 1..16: note = Severe acute respiratory syndrome coronavirus 2
ATVRLQAGNATEVPAN

SEQ ID NO: 21223 - protein, 13 aa, Severe acute respiratory syndrome-related coronavirus
  REGION 1..13: note = Table B: HLA-DPA1*03:01-B1*04:02L
  source 1..13: note = Severe acute respiratory syndrome coronavirus 2
STDVVYRAFDIYN

SEQ ID NO: 21224 - protein, 14 aa, Severe acute respiratory syndrome-related coronavirus
  REGION 1..14: note = Table B: HLA-DPA1*03:01-B1*04:02L HLA-DRB1*11:02L HLA-DRB1*11:03L HLA-DRB1*14:02L HLA-DQA1*05:05-B1*03:19L HLA-DRB1*13:01L HLA-DPA1*01:03-B1*04:02L HLA-DPA1*03:01-B1*105:01L HLA-DRB1*08:02L
  source 1..14: note = Severe acute respiratory syndrome coronavirus 2
SYFVVKRHTFSNYQ

SEQ ID NO: 21225 - protein, 12 aa, Severe acute respiratory syndrome-related coronavirus
  REGION 1..12: note = Table B: HLA-DPA1*03:01-B1*04:02L HLA-DPA1*02:01-B1*13:01L
  source 1..12: note = Severe acute respiratory syndrome coronavirus 2
WYDFVENPDILR

SEQ ID NO: 21226 - protein, 12 aa, Severe acute respiratory syndrome-related coronavirus
  REGION 1..12: note = Table B: HLA-DPA1*03:01-B1*04:02L HLA-DQA1*05:01-B1*02:01L HLA-DPA1*03:01-B1*105:01L
  source 1..12: note = Severe acute respiratory syndrome coronavirus 2
GNWYDFGDFIQT

SEQ ID NO: 21227 - protein, 13 aa, Severe acute respiratory syndrome-related coronavirus
  REGION 1..13: note = Table B: HLA-DPA1*03:01-B1*04:02L HLA-DQA1*01:01-B1*05:01L HLA-DPA1*02:01-B1*13:01L
  source 1..13: note = Severe acute respiratory syndrome coronavirus 2
TPGSGVPVVDSYY

SEQ ID NO: 21228 - protein, 12 aa, Severe acute respiratory syndrome-related coronavirus
  REGION 1..12: note = Table B: HLA-DPA1*03:01-B1*04:02L
  source 1..12: note = Severe acute respiratory syndrome coronavirus 2
VDSYYSLLMPIL

SEQ ID NO: 21229 - protein, 13 aa, Severe acute respiratory syndrome-related coronavirus
  REGION 1..13: note = Table B: HLA-DPA1*03:01-B1*04:02L HLA-DPA1*01:02-B1*04:01L
  source 1..13: note = Severe acute respiratory syndrome coronavirus 2
PYIKWDLLKYDFT

SEQ ID NO: 21230 - protein, 14 aa, Severe acute respiratory syndrome-related coronavirus
  REGION 1..14: note = Table B: HLA-DPA1*03:01-B1*04:02L HLA-DRB1*15:03L
  source 1..14: note = Severe acute respiratory syndrome coronavirus 2
FVDGVPFVVSTGYH

SEQ ID NO: 21231 - protein, 13 aa, Severe acute respiratory syndrome-related coronavirus
  REGION 1..13: note = Table B: HLA-DPA1*03:01-B1*04:02L HLA-DPA1*01:02-B1*04:01L HLA-DRB1*16:01L HLA-DRB1*04:08L
  source 1..13: note = Severe acute respiratory syndrome coronavirus 2
SSRLSFKELLVYA

SEQ ID NO: 21232 - protein, 15 aa, Severe acute respiratory syndrome-related coronavirus
  REGION 1..15: note = Table B: HLA-DPA1*03:01-B1*04:02L HLA-DPA1*01:02-B1*04:01L
  source 1..15: note = Severe acute respiratory syndrome coronavirus 2
SRLSFKELLVYAADP

SEQ ID NO: 21233 - protein, 11 aa, Severe acute respiratory syndrome-related coronavirus
  REGION 1..11: note = Table B: HLA-DPA1*03:01-B1*04:02L
  source 1..11: note = Severe acute respiratory syndrome coronavirus 2
LLVYAADPAMH

SEQ ID NO: 21234 - protein, 15 aa, Severe acute respiratory syndrome-related coronavirus
  REGION 1..15: note = Table B: HLA-DPA1*03:01-B1*04:02L HLA-DRB1*11:02L HLA-DQA1*05:05-B1*03:19L HLA-DPA1*01:03-B1*04:02L
  source 1..15: note = Severe acute respiratory syndrome coronavirus 2
GNLLLDKRTTCFSVA

SEQ ID NO: 21235 - protein, 15 aa, Severe acute respiratory syndrome-related coronavirus
  REGION 1..15: note = Table B: HLA-DPA1*03:01-B1*04:02L HLA-DPA1*01:02-B1*04:01L
  source 1..15: note = Severe acute respiratory syndrome coronavirus 2
VAALTNNVAFQTVKP

SEQ ID NO: 21236 - protein, 13 aa, Severe acute respiratory syndrome-related coronavirus
  REGION 1..13: note = Table B: HLA-DPA1*03:01-B1*04:02L HLA-DRB1*08:01L HLA-DPA1*01:03-B1*04:01L HLA-DPA1*02:01-B1*13:01L HLA-DQA1*03:01-B1*03:02L HLA-DPA1*01:02-B1*04:01L HLA-DRB1*16:01L HLA-DRB1*04:08L HLA-DRB1*15:03L
  source 1..13: note = Severe acute respiratory syndrome coronavirus 2
KPGNFNKDFYDFA

SEQ ID NO: 21237 - protein, 12 aa, Severe acute respiratory syndrome-related coronavirus
  REGION 1..12: note = Table B: HLA-DPA1*03:01-B1*04:02L HLA-DQA1*05:01-B1*02:01L HLA-DPA1*03:01-B1*105:01L
  source 1..12: note = Severe acute respiratory syndrome coronavirus 2
NFNKDFYDFAVS

SEQ ID NO: 21238 - protein, 13 aa, Severe acute respiratory syndrome-related coronavirus
  REGION 1..13: note = Table B: HLA-DPA1*03:01-B1*04:02L HLA-DPA1*03:01-B1*105:01L
  source 1..13: note = Severe acute respiratory syndrome coronavirus 2
SDYDYYRYNLPTM

SEQ ID NO: 21239 - protein, 13 aa, Severe acute respiratory syndrome-related coronavirus
  REGION 1..13: note = Table B: HLA-DPA1*03:01-B1*04:02L
  source 1..13: note = Severe acute respiratory syndrome coronavirus 2
VVEVVDKYFDCYD

SEQ ID NO: 21240 - protein, 14 aa, Severe acute respiratory syndrome-related coronavirus
  REGION 1..14: note = Table B: HLA-DPA1*03:01-B1*04:02L HLA-DRB1*16:01L
  source 1..14: note = Severe acute respiratory syndrome coronavirus 2
VEVVDKYFDCYDGG

SEQ ID NO: 21241 - protein, 10 aa, Severe acute respiratory syndrome-related coronavirus
  REGION 1..10: note = Table B: HLA-DPA1*03:01-B1*04:02L HLA-DRB1*14:01L HLA-DPA1*01:02-B1*04:01L HLA-DRB1*16:01L
  source 1..10: note = Severe acute respiratory syndrome coronavirus 2
FAYTKRNVIP

SEQ ID NO: 21242 - protein, 12 aa, Severe acute respiratory syndrome-related coronavirus
  REGION 1..12: note = Table B: HLA-DPA1*03:01-B1*04:02L HLA-DRB1*14:01L
  source 1..12: note = Severe acute respiratory syndrome coronavirus 2
VIPTITQMNLKY

SEQ ID NO: 21243 - protein, 18 aa, Severe acute respiratory syndrome-related coronavirus
  REGION 1..18: note = Table B: HLA-DPA1*03:01-B1*04:02L
  source 1..18: note = Severe acute respiratory syndrome coronavirus 2
MNLKYAISAKNRARTVAG

SEQ ID NO: 21244 - protein, 14 aa, Severe acute respiratory syndrome-related coronavirus
  REGION 1..14: note = Table B: HLA-DPA1*03:01-B1*04:02L HLA-DQA1*01:01-B1*05:01L HLA-DRB1*08:01L HLA-DRB1*11:01L HLA-DPA1*01:03-B1*04:02L
  source 1..14: note = Severe acute respiratory syndrome coronavirus 2
IAATRGATVVIGTS

SEQ ID NO: 21245 - protein, 14 aa, Severe acute respiratory syndrome-related coronavirus
  REGION 1..14: note = Table B: HLA-DPA1*03:01-B1*04:02L HLA-DRB3*01:01L
  source 1..14: note = Severe acute respiratory syndrome coronavirus 2
NMLKTVYSDVENPH

SEQ ID NO: 21246 - protein, 13 aa, Severe acute respiratory syndrome-related coronavirus
  REGION 1..13: note = Table B: HLA-DPA1*03:01-B1*04:02L HLA-DPA1*03:01-B1*105:01L HLA-DRB1*15:03L
  source 1..13: note = Severe acute respiratory syndrome coronavirus 2
NPHLMGWDYPKCD

SEQ ID NO: 21247 - protein, 11 aa, Severe acute respiratory syndrome-related coronavirus
  REGION 1..11: note = Table B: HLA-DPA1*03:01-B1*04:02L HLA-DPA1*03:01-B1*105:01L
  source 1..11: note = Severe acute respiratory syndrome coronavirus 2
TAYANSVFNIC

SEQ ID NO: 21248 - protein, 10 aa, Severe acute respiratory syndrome-related coronavirus
  REGION 1..10: note = Table B: HLA-DPA1*03:01-B1*04:02L HLA-DPA1*03:01-B1*105:01L HLA-DPA1*01:02-B1*04:01L
  source 1..10: note = Severe acute respiratory syndrome coronavirus 2
YANSVFNICQ

SEQ ID NO: 21249 - protein, 16 aa, Severe acute respiratory syndrome-related coronavirus
  REGION 1..16: note = Table B: HLA-DPA1*03:01-B1*04:02L HLA-DPA1*03:01-B1*105:01L
  source 1..16: note = Severe acute respiratory syndrome coronavirus 2
HRLYECLYRNRDVDTD

SEQ ID NO: 21250 - protein, 10 aa, Severe acute respiratory syndrome-related coronavirus
  REGION 1..10: note = Table B: HLA-DPA1*03:01-B1*04:02L HLA-DPA1*03:01-B1*105:01L HLA-DPA1*01:02-B1*04:01L
  source 1..10: note = Severe acute respiratory syndrome coronavirus 2
DFVNEFYAYL

SEQ ID NO: 21251 - protein, 13 aa, Severe acute respiratory syndrome-related coronavirus
  REGION 1..13: note = Table B: HLA-DPA1*03:01-B1*04:02L HLA-DRB1*11:02L
  source 1..13: note = Severe acute respiratory syndrome coronavirus 2
EFYAYLRKHFSMM

SEQ ID NO: 21252 - protein, 15 aa, Severe acute respiratory syndrome-related coronavirus
  REGION 1..15: note = Table B: HLA-DPA1*03:01-B1*04:02L HLA-DPA1*01:03-B1*04:02L
  source 1..15: note = Severe acute respiratory syndrome coronavirus 2
LRKHFSMMILSDDAV

SEQ ID NO: 21253 - protein, 16 aa, Severe acute respiratory syndrome-related coronavirus
  REGION 1..16: note = Table B: HLA-DPA1*03:01-B1*04:02L HLA-DPA1*02:01-B1*13:01L
  source 1..16: note = Severe acute respiratory syndrome coronavirus 2
LVKQGDDYVYLPYPDP

SEQ ID NO: 21254 - protein, 20 aa, Severe acute respiratory syndrome-related coronavirus
  REGION 1..20: note = Table B: HLA-DPA1*03:01-B1*04:02L HLA-DRB1*14:02L HLA-DRB1*12:01L
  source 1..20: note = Severe acute respiratory syndrome coronavirus 2
PYPDPSRILGAGCFVDDIVK

SEQ ID NO: 21255 - protein, 13 aa, Severe acute respiratory syndrome-related coronavirus
  REGION 1..13: note = Table B: HLA-DPA1*03:01-B1*04:02L HLA-DPA1*01:03-B1*04:02L HLA-DPA1*01:02-B1*04:01L
  source 1..13: note = Severe acute respiratory syndrome coronavirus 2
FVSLAIDAYPLTK

SEQ ID NO: 21256 - protein, 16 aa, Severe acute respiratory syndrome-related coronavirus
  REGION 1..16: note = Table B: HLA-DPA1*03:01-B1*04:02L HLA-DPA1*01:03-B1*04:02L HLA-DPA1*03:01-B1*105:01L
  source 1..16: note = Severe acute respiratory syndrome coronavirus 2
FHLYLQYIRKLHDELT

SEQ ID NO: 21257 - protein, 15 aa, Severe acute respiratory syndrome-related coronavirus
  REGION 1..15: note = Table B: HLA-DPA1*03:01-B1*04:02L
  source 1..15: note = Severe acute respiratory syndrome coronavirus 2
FNAIATCDWTNAGDY

SEQ ID NO: 21258 - protein, 16 aa, Severe acute respiratory syndrome-related coronavirus
  REGION 1..16: note = Table B: HLA-DPA1*03:01-B1*04:02L HLA-DRB1*11:02L HLA-DPA1*01:03-B1*04:02L HLA-DRB1*08:02L
  source 1..16: note = Severe acute respiratory syndrome coronavirus 2
TEETFKLSYGIATVRE

SEQ ID NO: 21259 - protein, 11 aa, Severe acute respiratory syndrome-related coronavirus
  REGION 1..11: note = Table B: HLA-DPA1*03:01-B1*04:02L
  source 1..11: note = Severe acute respiratory syndrome coronavirus 2
LSYGIATVREV

SEQ ID NO: 21260 - protein, 10 aa, Severe acute respiratory syndrome-related coronavirus
  REGION 1..10: note = Table B: HLA-DPA1*03:01-B1*04:02L HLA-DQA1*01-B1*05L HLA-DPA1*03:01-B1*105:01L HLA-DPA1*01:02-B1*04:01L HLA-DRB1*16:01L
  source 1..10: note = Severe acute respiratory syndrome coronavirus 2
NYVFTGYRVT

SEQ ID NO: 21261 - protein, 13 aa, Severe acute respiratory syndrome-related coronavirus
  REGION 1..13: note = Table B: HLA-DPA1*03:01-B1*04:02L HLA-DPA1*02:01-B1*13:01L HLA-DQA1*01:03-B1*06:01L
  source 1..13: note = Severe acute respiratory syndrome coronavirus 2
YTFEKGDYGDAVV

SEQ ID NO: 21262 - protein, 12 aa, Severe acute respiratory syndrome-related coronavirus
  REGION 1..12: note = Table B: HLA-DPA1*03:01-B1*04:02L HLA-DPA1*03:01-B1*105:01L HLA-DRB1*15:03L
  source 1..12: note = Severe acute respiratory syndrome coronavirus 2
YKLNVGDYFVLT

SEQ ID NO: 21263 - protein, 12 aa, Severe acute respiratory syndrome-related coronavirus
  REGION 1..12: note = Table B: HLA-DPA1*03:01-B1*04:02L HLA-DPA1*01:03-B1*04:02L HLA-DPA1*03:01-B1*105:01L
  source 1..12: note = Severe acute respiratory syndrome coronavirus 2
LNVGDYFVLTSH

SEQ ID NO: 21264 - protein, 12 aa, Severe acute respiratory syndrome-related coronavirus
  REGION 1..12: note = Table B: HLA-DPA1*03:01-B1*04:02L HLA-DPA1*01:03-B1*04:02L HLA-DQA1*02:01-B1*03:03L
  source 1..12: note = Severe acute respiratory syndrome coronavirus 2
NVGDYFVLTSHT

SEQ ID NO: 21265 - protein, 11 aa, Severe acute respiratory syndrome-related coronavirus
  REGION 1..11: note = Table B: HLA-DPA1*03:01-B1*04:02L HLA-DRB1*15:03L
  source 1..11: note = Severe acute respiratory syndrome coronavirus 2
FSSNVANYQKV

SEQ ID NO: 21266 - protein, 13 aa, Severe acute respiratory syndrome-related coronavirus
  REGION 1..13: note = Table B: HLA-DPA1*03:01-B1*04:02L HLA-DPA1*01:03-B1*04:02L HLA-DPA1*01:02-B1*04:01L
  source 1..13: note = Severe acute respiratory syndrome coronavirus 2
HFAIGLALYYPSA

SEQ ID NO: 21267 - protein, 12 aa, Severe acute respiratory syndrome-related coronavirus
  REGION 1..12: note = Table B: HLA-DPA1*03:01-B1*04:02L HLA-DPA1*03:01-B1*105:01L
  source 1..12: note = Severe acute respiratory syndrome coronavirus 2
KALKYLPIDKCS

SEQ ID NO: 21268 - protein, 11 aa, Severe acute respiratory syndrome-related coronavirus
  REGION 1..11: note = Table B: HLA-DPA1*03:01-B1*04:02L HLA-DPA1*03:01-B1*105:01L HLA-DPA1*01:02-B1*04:01L
  source 1..11: note = Severe acute respiratory syndrome coronavirus 2
TLEQYVFCTVN

SEQ ID NO: 21269 - protein, 13 aa, Severe acute respiratory syndrome-related coronavirus
  REGION 1..13: note = Table B: HLA-DPA1*03:01-B1*04:02L HLA-DPA1*03:01-B1*105:01L
  source 1..13: note = Severe acute respiratory syndrome coronavirus 2
LEQYVFCTVNALP

SEQ ID NO: 21270 - protein, 12 aa, Severe acute respiratory syndrome-related coronavirus
  REGION 1..12: note = Table B: HLA-DPA1*03:01-B1*04:02L HLA-DRB1*14:01L HLA-DRB1*14:17L
  source 1..12: note = Severe acute respiratory syndrome coronavirus 2
TADIVVFDEISM

SEQ ID NO: 21271 - protein, 14 aa, Severe acute respiratory syndrome-related coronavirus
  REGION 1..14: note = Table B: HLA-DPA1*03:01-B1*04:02L HLA-DPA1*03:01-B1*105:01L
  source 1..14: note = Severe acute respiratory syndrome coronavirus 2
DEISMATNYDLSVV

SEQ ID NO: 21272 - protein, 12 aa, Severe acute respiratory syndrome-related coronavirus
  REGION 1..12: note = Table B: HLA-DPA1*03:01-B1*04:02L HLA-DRB1*12:01L HLA-DPA1*03:01-B1*105:01L HLA-DPA1*01:02-B1*04:01L HLA-DRB1*16:01L HLA-DRB1*15:03L
  source 1..12: note = Severe acute respiratory syndrome coronavirus 2
EPEYFNSVCRLM

SEQ ID NO: 21273 - protein, 11 aa, Severe acute respiratory syndrome-related coronavirus
  REGION 1..11: note = Table B: HLA-DPA1*03:01-B1*04:02L HLA-DPA1*01:02-B1*04:01L
  source 1..11: note = Severe acute respiratory syndrome coronavirus 2
KTIGPDMFLGT

SEQ ID NO: 21274 - protein, 11 aa, Severe acute respiratory syndrome-related coronavirus
  REGION 1..11: note = Table B: HLA-DPA1*03:01-B1*04:02L HLA-DRB1*14:01L HLA-DPA1*02:01-B1*13:01L HLA-DPA1*03:01-B1*105:01L HLA-DRB1*08:02L HLA-DQA1*02:01-B1*03:03L
  source 1..11: note = Severe acute respiratory syndrome coronavirus 2
EIVDTVSALVY

SEQ ID NO: 21275 - protein, 13 aa, Severe acute respiratory syndrome-related coronavirus
  REGION 1..13: note = Table B: HLA-DPA1*03:01-B1*04:02L HLA-DRB1*11:02L HLA-DQA1*05:05-B1*03:19L
  source 1..13: note = Severe acute respiratory syndrome coronavirus 2
ALVYDNKLKAHKD

SEQ ID NO: 21276 - protein, 13 aa, Severe acute respiratory syndrome-related coronavirus
  REGION 1..13: note = Table B: HLA-DPA1*03:01-B1*04:02L HLA-DPA1*02:01-B1*13:01L HLA-DPA1*01:03-B1*104:01L HLA-DPA1*01:02-B1*04:01L
  source 1..13: note = Severe acute respiratory syndrome coronavirus 2
SPYNSQNAVASKI

SEQ ID NO: 21277 - protein, 12 aa, Severe acute respiratory syndrome-related coronavirus
  REGION 1..12: note = Table B: HLA-DPA1*03:01-B1*04:02L HLA-DPA1*01:03-B1*04:02L HLA-DPA1*03:01-B1*105:01L HLA-DPA1*01:02-B1*04:01L
  source 1..12: note = Severe acute respiratory syndrome coronavirus 2
EYDYVIFTQTTE

SEQ ID NO: 21278 - protein, 14 aa, Severe acute respiratory syndrome-related coronavirus
  REGION 1..14: note = Table B: HLA-DPA1*03:01-B1*04:02L HLA-DPA1*01:03-B1*04:02L HLA-DPA1*03:01-B1*105:01L HLA-DRB1*04:08L
  source 1..14: note = Severe acute respiratory syndrome coronavirus 2
DTKFKTEGLCVDIP

SEQ ID NO: 21279 - protein, 12 aa, Severe acute respiratory syndrome-related coronavirus
  REGION 1..12: note = Table B: HLA-DPA1*03:01-B1*04:02L HLA-DPA1*03:01-B1*105:01L HLA-DPA1*01:02-B1*04:01L HLA-DQA1*01:03-B1*06:01L
  source 1..12: note = Severe acute respiratory syndrome coronavirus 2
FKTEGLCVDIPG

SEQ ID NO: 21280 - protein, 16 aa, Severe acute respiratory syndrome-related coronavirus
  REGION 1..16: note = Table B: HLA-DPA1*03:01-B1*04:02L HLA-DRB1*14:02L HLA-DPA1*01:03-B1*04:02L
  source 1..16: note = Severe acute respiratory syndrome coronavirus 2
RRLISMMGFKMNYQVN

SEQ ID NO: 21281 - protein, 12 aa, Severe acute respiratory syndrome-related coronavirus
  REGION 1..12: note = Table B: HLA-DPA1*03:01-B1*04:02L HLA-DQA1*05:01-B1*02:01L HLA-DRB1*12:01L HLA-DPA1*03:01-B1*105:01L HLA-DPA1*01:02-B1*04:01L HLA-DRB1*16:01L HLA-DQA1*01:03-B1*06:01L HLA-DRB1*15:03L
  source 1..12: note = Severe acute respiratory syndrome coronavirus 2
YPNMFITREEAI

SEQ ID NO: 21282 - protein, 12 aa, Severe acute respiratory syndrome-related coronavirus
  REGION 1..12: note = Table B: HLA-DPA1*03:01-B1*04:02L HLA-DPA1*03:01-B1*105:01L HLA-DPA1*01:02-B1*04:01L
  source 1..12: note = Severe acute respiratory syndrome coronavirus 2
KHLIPLMYKGLP

SEQ ID NO: 21283 - protein, 10 aa, Severe acute respiratory syndrome-related coronavirus
  REGION 1..10: note = Table B: HLA-DPA1*03:01-B1*04:02L HLA-DRB1*15:03L
  source 1..10: note = Severe acute respiratory syndrome coronavirus 2
VFVLWAHGFE

SEQ ID NO: 21284 - protein, 10 aa, Severe acute respiratory syndrome-related coronavirus
  REGION 1..10: note = Table B: HLA-DPA1*03:01-B1*04:02L HLA-DQA1*01-B1*05L HLA-DQA1*05:01-B1*02:01L HLA-DPA1*01:03-B1*04:01L HLA-DPA1*01:03-B1*04:02L HLA-DRB1*12:01L HLA-DPA1*03:01-B1*105:01L HLA-DPA1*01:02-B1*04:01L
  REGION 1..10: note = CONT. FROM ABOVE: HLA-DRB1*16:01L HLA-DQA1*01:03-B1*06:01L HLA-D QA1*02:01-B1*03:03L HLA-DRB1*15:03L
  source 1..10: note = Severe acute respiratory syndrome coronavirus 2
VLWAHGFELT

SEQ ID NO: 21285 - protein, 10 aa, Severe acute respiratory syndrome-related coronavirus
  REGION 1..10: note = Table B: HLA-DPA1*03:01-B1*04:02L HLA-DPA1*03:01-B1*105:01L HLA-DPA1*01:02-B1*04:01L
  source 1..10: note = Severe acute respiratory syndrome coronavirus 2
LWAHGFELTS

SEQ ID NO: 21286 - protein, 13 aa, Severe acute respiratory syndrome-related coronavirus
  REGION 1..13: note = Table B: HLA-DPA1*03:01-B1*04:02L
  source 1..13: note = Severe acute respiratory syndrome coronavirus 2
SMKYFVKIGPERT

SEQ ID NO: 21287 - protein, 10 aa, Severe acute respiratory syndrome-related coronavirus
  REGION 1..10: note = Table B: HLA-DPA1*03:01-B1*04:02L HLA-DQA1*01-B1*05L HLA-DPA1*03:01-B1*105:01L HLA-DPA1*01:02-B1*04:01L HLA-DQA1*01:03-B1*06:01L
  source 1..10: note = Severe acute respiratory syndrome coronavirus 2
DYVYNPFMID

SEQ ID NO: 21288 - protein, 10 aa, Severe acute respiratory syndrome-related coronavirus
  REGION 1..10: note = Table B: HLA-DPA1*03:01-B1*04:02L HLA-DQA1*01-B1*05L HLA-DPA1*03:01-B1*105:01L HLA-DPA1*01:02-B1*04:01L HLA-DQA1*01:03-B1*06:01L
  source 1..10: note = Severe acute respiratory syndrome coronavirus 2
VYNPFMIDVQ

SEQ ID NO: 21289 - protein, 12 aa, Severe acute respiratory syndrome-related coronavirus
  REGION 1..12: note = Table B: HLA-DPA1*03:01-B1*04:02L HLA-DPA1*02:01-B1*13:01L
  source 1..12: note = Severe acute respiratory syndrome coronavirus 2
FTGNLQSNHDLY

SEQ ID NO: 21290 - protein, 13 aa, Severe acute respiratory syndrome-related coronavirus
  REGION 1..13: note = Table B: HLA-DPA1*03:01-B1*04:02L HLA-DQA1*01-B1*05L HLA-DRB1*12:01L HLA-DRB1*16:01L HLA-DRB1*15:03L
  source 1..13: note = Severe acute respiratory syndrome coronavirus 2
VKRVDWTIEYPII

SEQ ID NO: 21291 - protein, 16 aa, Severe acute respiratory syndrome-related coronavirus
  REGION 1..16: note = Table B: HLA-DPA1*03:01-B1*04:02L HLA-DRB1*14:02L HLA-DPA1*01:03-B1*04:02L HLA-DPA1*01:03-B1*104:01L HLA-DQA1*05:05-B1*03:01L
  source 1..16: note = Severe acute respiratory syndrome coronavirus 2
VQHMVVKAALLADKFP

SEQ ID NO: 21292 - protein, 12 aa, Severe acute respiratory syndrome-related coronavirus
  REGION 1..12: note = Table B: HLA-DPA1*03:01-B1*04:02L HLA-DQA1*01-B1*05L HLA-DPA1*01:02-B1*04:01L
  source 1..12: note = Severe acute respiratory syndrome coronavirus 2
ADVEWKFYDAQP

SEQ ID NO: 21293 - protein, 13 aa, Severe acute respiratory syndrome-related coronavirus
  REGION 1..13: note = Table B: HLA-DPA1*03:01-B1*04:02L HLA-DRB1*12:01L HLA-DPA1*01:02-B1*04:01L
  source 1..13: note = Severe acute respiratory syndrome coronavirus 2
SDKAYKIEELFYS

SEQ ID NO: 21294 - protein, 13 aa, Severe acute respiratory syndrome-related coronavirus
  REGION 1..13: note = Table B: HLA-DPA1*03:01-B1*04:02L
  source 1..13: note = Severe acute respiratory syndrome coronavirus 2
LFYSYATHSDKFT

SEQ ID NO: 21295 - protein, 19 aa, Severe acute respiratory syndrome-related coronavirus
  REGION 1..19: note = Table B: HLA-DPA1*03:01-B1*04:02L
  source 1..19: note = Severe acute respiratory syndrome coronavirus 2
YPANSIVCRFDTRVLSNLN

SEQ ID NO: 21296 - protein, 16 aa, Severe acute respiratory syndrome-related coronavirus
  REGION 1..16: note = Table B: HLA-DPA1*03:01-B1*04:02L HLA-DRB1*11:02L HLA-DRB1*14:02L HLA-DQA1*05:01-B1*02:01L HLA-DPA1*01:03-B1*04:02L HLA-DPA1*01:03-B1*104:01L
  source 1..16: note = Severe acute respiratory syndrome coronavirus 2
TRVLSNLNLPGCDGGS

SEQ ID NO: 21297 - protein, 11 aa, Severe acute respiratory syndrome-related coronavirus
  REGION 1..11: note = Table B: HLA-DPA1*03:01-B1*04:02L HLA-DPA1*01:02-B1*04:01L
  source 1..11: note = Severe acute respiratory syndrome coronavirus 2
VNLKQLPFFYY

SEQ ID NO: 21298 - protein, 14 aa, Severe acute respiratory syndrome-related coronavirus
  REGION 1..14: note = Table B: HLA-DPA1*03:01-B1*04:02L HLA-DPA1*01:03-B1*04:02L HLA-DPA1*01:02-B1*04:01L
  source 1..14: note = Severe acute respiratory syndrome coronavirus 2
NLKQLPFFYYSDSP

SEQ ID NO: 21299 - protein, 11 aa, Severe acute respiratory syndrome-related coronavirus
  REGION 1..11: note = Table B: HLA-DPA1*03:01-B1*04:02L HLA-DQA1*05:01-B1*02:01L HLA-DPA1*03:01-B1*105:01L HLA-DRB1*16:01L HLA-DQA1*01:03-B1*06:01L
  source 1..11: note = Severe acute respiratory syndrome coronavirus 2
DIDYVPLKSAT

SEQ ID NO: 21300 - protein, 12 aa, Severe acute respiratory syndrome-related coronavirus
  REGION 1..12: note = Table B: HLA-DPA1*03:01-B1*04:02L HLA-DRB1*14:01L HLA-DQA1*05:01-B1*02:01L
  source 1..12: note = Severe acute respiratory syndrome coronavirus 2
LDAYNMMISAGF

SEQ ID NO: 21301 - protein, 13 aa, Severe acute respiratory syndrome-related coronavirus
  REGION 1..13: note = Table B: HLA-DPA1*03:01-B1*04:02L HLA-DRB1*15:03L
  source 1..13: note = Severe acute respiratory syndrome coronavirus 2
ISAGFSLWVYKQF

SEQ ID NO: 21302 - protein, 10 aa, Severe acute respiratory syndrome-related coronavirus
  REGION 1..10: note = Table B: HLA-DPA1*03:01-B1*04:02L HLA-DPA1*03:01-B1*105:01L HLA-DPA1*01:02-B1*04:01L
  source 1..10: note = Severe acute respiratory syndrome coronavirus 2
NLWNTFTRLQ

SEQ ID NO: 21303 - protein, 11 aa, Severe acute respiratory syndrome-related coronavirus
  REGION 1..11: note = Table B: HLA-DPA1*03:01-B1*04:02L HLA-DPA1*01:03-B1*04:02L HLA-DPA1*03:01-B1*105:01L
  source 1..11: note = Severe acute respiratory syndrome coronavirus 2
WNTFTRLQSLE

SEQ ID NO: 21304 - protein, 12 aa, Severe acute respiratory syndrome-related coronavirus
  REGION 1..12: note = Table B: HLA-DPA1*03:01-B1*04:02L HLA-DQA1*05:01-B1*02:01L HLA-DPA1*01:03-B1*04:01L HLA-DRB1*12:01L HLA-DPA1*03:01-B1*105:01L HLA-DPA1*01:02-B1*04:01L HLA-DRB1*16:01L HLA-DRB1*15:03L
  source 1..12: note = Severe acute respiratory syndrome coronavirus 2
LQSLENVAFNVV

SEQ ID NO: 21305 - protein, 12 aa, Severe acute respiratory syndrome-related coronavirus
  REGION 1..12: note = Table B: HLA-DPA1*03:01-B1*04:02L HLA-DQA1*05:01-B1*02:01L HLA-DPA1*03:01-B1*105:01L
  source 1..12: note = Severe acute respiratory syndrome coronavirus 2
DGVDVELFENKT

SEQ ID NO: 21306 - protein, 11 aa, Severe acute respiratory syndrome-related coronavirus
  REGION 1..11: note = Table B: HLA-DPA1*03:01-B1*04:02L
  source 1..11: note = Severe acute respiratory syndrome coronavirus 2
KLEGYAFEHIV

SEQ ID NO: 21307 - protein, 12 aa, Severe acute respiratory syndrome-related coronavirus
  REGION 1..12: note = Table B: HLA-DPA1*03:01-B1*04:02L HLA-DPA1*03:01-B1*105:01L HLA-DRB1*16:01L
  source 1..12: note = Severe acute respiratory syndrome coronavirus 2
FEHIVYGDFSHS

SEQ ID NO: 21308 - protein, 17 aa, Severe acute respiratory syndrome-related coronavirus
  REGION 1..17: note = Table B: HLA-DPA1*03:01-B1*04:02L HLA-DQA1*05:05-B1*03:19L
  source 1..17: note = Severe acute respiratory syndrome coronavirus 2
LHLLIGLAKRFKESPFE

SEQ ID NO: 21309 - protein, 10 aa, Severe acute respiratory syndrome-related coronavirus
  REGION 1..10: note = Table B: HLA-DPA1*03:01-B1*04:02L HLA-DPA1*01:02-B1*04:01L
  source 1..10: note = Severe acute respiratory syndrome coronavirus 2
PFELEDFIPM

SEQ ID NO: 21310 - protein, 10 aa, Severe acute respiratory syndrome-related coronavirus
  REGION 1..10: note = Table B: HLA-DPA1*03:01-B1*04:02L HLA-DPA1*01:03-B1*04:01L HLA-DPA1*03:01-B1*105:01L HLA-DPA1*01:02-B1*04:01L
  source 1..10: note = Severe acute respiratory syndrome coronavirus 2
FELEDFIPMD

SEQ ID NO: 21311 - protein, 12 aa, Severe acute respiratory syndrome-related coronavirus
  REGION 1..12: note = Table B: HLA-DPA1*03:01-B1*04:02L
  source 1..12: note = Severe acute respiratory syndrome coronavirus 2
YTEISFMLWCKD

SEQ ID NO: 21312 - protein, 12 aa, Severe acute respiratory syndrome-related coronavirus
  REGION 1..12: note = Table B: HLA-DPA1*03:01-B1*04:02L HLA-DPA1*01:03-B1*04:02L HLA-DPA1*03:01-B1*105:01L
  source 1..12: note = Severe acute respiratory syndrome coronavirus 2
EISFMLWCKDGH

SEQ ID NO: 21313 - protein, 12 aa, Severe acute respiratory syndrome-related coronavirus
  REGION 1..12: note = Table B: HLA-DPA1*03:01-B1*04:02L
  source 1..12: note = Severe acute respiratory syndrome coronavirus 2
ISFMLWCKDGHV

SEQ ID NO: 21314 - protein, 12 aa, Severe acute respiratory syndrome-related coronavirus
  REGION 1..12: note = Table B: HLA-DPA1*03:01-B1*04:02L HLA-DPA1*01:03-B1*04:01L
  source 1..12: note = Severe acute respiratory syndrome coronavirus 2
AWQPGVAMPNLY

SEQ ID NO: 21315 - protein, 12 aa, Severe acute respiratory syndrome-related coronavirus
  REGION 1..12: note = Table B: HLA-DPA1*03:01-B1*04:02L HLA-DPA1*03:01-B1*105:01L
  source 1..12: note = Severe acute respiratory syndrome coronavirus 2
NVAKYTQLCQYL

SEQ ID NO: 21316 - protein, 12 aa, Severe acute respiratory syndrome-related coronavirus
  REGION 1..12: note = Table B: HLA-DPA1*03:01-B1*04:02L HLA-DPA1*03:01-B1*105:01L HLA-DPA1*01:02-B1*04:01L
  source 1..12: note = Severe acute respiratory syndrome coronavirus 2
VAKYTQLCQYLN

SEQ ID NO: 21317 - protein, 16 aa, Severe acute respiratory syndrome-related coronavirus
  REGION 1..16: note = Table B: HLA-DPA1*03:01-B1*04:02L HLA-DRB1*11:02L HLA-DRB1*11:01L
  source 1..16: note = Severe acute respiratory syndrome coronavirus 2
ADSTLIGDCATVHTAN

SEQ ID NO: 21318 - protein, 13 aa, Severe acute respiratory syndrome-related coronavirus
  REGION 1..13: note = Table B: HLA-DPA1*03:01-B1*04:02L HLA-DRB1*12:01L HLA-DPA1*03:01-B1*105:01L
  source 1..13: note = Severe acute respiratory syndrome coronavirus 2
TANKWDLIISDMY

SEQ ID NO: 21319 - protein, 10 aa, Severe acute respiratory syndrome-related coronavirus
  REGION 1..10: note = Table B: HLA-DPA1*03:01-B1*04:02L HLA-DPA1*01:03-B1*04:01L HLA-DPA1*03:01-B1*105:01L HLA-DPA1*01:02-B1*04:01L HLA-DQA1*01:03-B1*06:01L
  source 1..10: note = Severe acute respiratory syndrome coronavirus 2
SWNADLYKLM

SEQ ID NO: 21320 - protein, 10 aa, Severe acute respiratory syndrome-related coronavirus
  REGION 1..10: note = Table B: HLA-DPA1*03:01-B1*04:02L HLA-DPA1*03:01-B1*105:01L HLA-DPA1*01:02-B1*04:01L HLA-DQA1*01:03-B1*06:01L
  source 1..10: note = Severe acute respiratory syndrome coronavirus 2
WNADLYKLMG

SEQ ID NO: 21321 - protein, 11 aa, Severe acute respiratory syndrome-related coronavirus
  REGION 1..11: note = Table B: HLA-DPA1*03:01-B1*04:02L HLA-DQA1*05:05-B1*03:19L HLA-DRB1*12:01L HLA-DPA1*03:01-B1*105:01L HLA-DQA1*02:01-B1*03:03L HLA-DRB1*15:03L
  source 1..11: note = Severe acute respiratory syndrome coronavirus 2
DLYKLMGHFAW

SEQ ID NO: 21322 - protein, 11 aa, Severe acute respiratory syndrome-related coronavirus
  REGION 1..11: note = Table B: HLA-DPA1*03:01-B1*04:02L HLA-DQA1*05:05-B1*03:19L HLA-DQA1*05:01-B1*02:01L HLA-DPA1*01:03-B1*04:01L HLA-DRB1*12:01L HLA-DPA1*02:01-B1*13:01L HLA-DQA1*01:03-B1*06:01L HLA-DQA1*02:01-B1*03:03L
  REGION 1..11: note = CONT. FROM ABOVE: HLA-DRB1*15:03L
  source 1..11: note = Severe acute respiratory syndrome coronavirus 2
NPIQLSSYSLF

SEQ ID NO: 21323 - protein, 12 aa, Severe acute respiratory syndrome-related coronavirus
  REGION 1..12: note = Table B: HLA-DPA1*03:01-B1*04:02L HLA-DQA1*05:01-B1*02:01L HLA-DRB1*16:01L HLA-DRB1*15:03L
  source 1..12: note = Severe acute respiratory syndrome coronavirus 2
SSYSLFDMSKFP

SEQ ID NO: 21324 - protein, 12 aa, Severe acute respiratory syndrome-related coronavirus
  REGION 1..12: note = Table B: HLA-DPA1*03:01-B1*04:02L HLA-DPA1*02:01-B1*13:01L
  source 1..12: note = Severe acute respiratory syndrome coronavirus 2
SFTRGVYYPDKV

SEQ ID NO: 21325 - protein, 13 aa, Severe acute respiratory syndrome-related coronavirus
  REGION 1..13: note = Table B: HLA-DPA1*03:01-B1*04:02L
  source 1..13: note = Severe acute respiratory syndrome coronavirus 2
HSTQDLFLPFFSN

SEQ ID NO: 21326 - protein, 13 aa, Severe acute respiratory syndrome-related coronavirus
  REGION 1..13: note = Table B: HLA-DPA1*03:01-B1*04:02L
  source 1..13: note = Severe acute respiratory syndrome coronavirus 2
ATNVVIKVCEFQF

SEQ ID NO: 21327 - protein, 12 aa, Severe acute respiratory syndrome-related coronavirus
  REGION 1..12: note = Table B: HLA-DPA1*03:01-B1*04:02L
  source 1..12: note = Severe acute respiratory syndrome coronavirus 2
NVVIKVCEFQFC

SEQ ID NO: 21328 - protein, 12 aa, Severe acute respiratory syndrome-related coronavirus
  REGION 1..12: note = Table B: HLA-DPA1*03:01-B1*04:02L HLA-DPA1*01:03-B1*04:02L HLA-DPA1*03:01-B1*105:01L
  source 1..12: note = Severe acute respiratory syndrome coronavirus 2
VVIKVCEFQFCN

SEQ ID NO: 21329 - protein, 12 aa, Severe acute respiratory syndrome-related coronavirus
  REGION 1..12: note = Table B: HLA-DPA1*03:01-B1*04:02L HLA-DPA1*03:01-B1*105:01L
  source 1..12: note = Severe acute respiratory syndrome coronavirus 2
IKVCEFQFCNDP

SEQ ID NO: 21330 - protein, 11 aa, Severe acute respiratory syndrome-related coronavirus
  REGION 1..11: note = Table B: HLA-DPA1*03:01-B1*04:02L HLA-DPA1*01:03-B1*04:02L HLA-DPA1*03:01-B1*105:01L HLA-DRB1*16:01L HLA-DRB1*04:08L
  source 1..11: note = Severe acute respiratory syndrome coronavirus 2
PFLGVYYHKNN

SEQ ID NO: 21331 - protein, 10 aa, Severe acute respiratory syndrome-related coronavirus
  REGION 1..10: note = Table B: HLA-DPA1*03:01-B1*04:02L HLA-DPA1*03:01-B1*105:01L HLA-DPA1*01:02-B1*04:01L
  source 1..10: note = Severe acute respiratory syndrome coronavirus 2
WMESEFRVYS

SEQ ID NO: 21332 - protein, 13 aa, Severe acute respiratory syndrome-related coronavirus
  REGION 1..13: note = Table B: HLA-DPA1*03:01-B1*04:02L
  source 1..13: note = Severe acute respiratory syndrome coronavirus 2
EFRVYSSANNCTF

SEQ ID NO: 21333 - protein, 10 aa, Severe acute respiratory syndrome-related coronavirus
  REGION 1..10: note = Table B: HLA-DPA1*03:01-B1*04:02L HLA-DQA1*01-B1*05L HLA-DPA1*01:03-B1*04:01L HLA-DPA1*03:01-B1*105:01L HLA-DPA1*01:02-B1*04:01L HLA-DQA1*01:03-B1*06:01L
  source 1..10: note = Severe acute respiratory syndrome coronavirus 2
EYVSQPFLMD

SEQ ID NO: 21334 - protein, 12 aa, Severe acute respiratory syndrome-related coronavirus
  REGION 1..12: note = Table B: HLA-DPA1*03:01-B1*04:02L HLA-DPA1*03:01-B1*105:01L HLA-DPA1*01:02-B1*04:01L HLA-DQA1*01:03-B1*06:01L
  source 1..12: note = Severe acute respiratory syndrome coronavirus 2
VSQPFLMDLEGK

SEQ ID NO: 21335 - protein, 13 aa, Severe acute respiratory syndrome-related coronavirus
  REGION 1..13: note = Table B: HLA-DPA1*03:01-B1*04:02L HLA-DRB1*11:02L HLA-DRB1*11:03L HLA-DRB1*14:02L HLA-DQA1*05:05-B1*03:19L HLA-DQA1*05:05-B1*03:116L HLA-DPA1*01:03-B1*04:02L HLA-DPA1*01:03-B1*02:01L HLA-DQA1*05:05-B1*03:01L
  REGION 1..13: note = CONT. FROM ABOVE: HLA-DRB1*08:02L
  source 1..13: note = Severe acute respiratory syndrome coronavirus 2
GYFKIYSKHTPIN

SEQ ID NO: 21336 - protein, 13 aa, Severe acute respiratory syndrome-related coronavirus
  REGION 1..13: note = Table B: HLA-DPA1*03:01-B1*04:02L
  source 1..13: note = Severe acute respiratory syndrome coronavirus 2
PINLVRDLPQGFS

SEQ ID NO: 21337 - protein, 12 aa, Severe acute respiratory syndrome-related coronavirus
  REGION 1..12: note = Table B: HLA-DPA1*03:01-B1*04:02L HLA-DQA1*01-B1*05L HLA-DPA1*01:03-B1*04:02L HLA-DPA1*02:01-B1*13:01L
  source 1..12: note = Severe acute respiratory syndrome coronavirus 2
NITRFQTLLALH

SEQ ID NO: 21338 - protein, 14 aa, Severe acute respiratory syndrome-related coronavirus
  REGION 1..14: note = Table B: HLA-DPA1*03:01-B1*04:02L HLA-DRB1*10:01L
  source 1..14: note = Severe acute respiratory syndrome coronavirus 2
ITRFQTLLALHRSY

SEQ ID NO: 21339 - protein, 16 aa, Severe acute respiratory syndrome-related coronavirus
  REGION 1..16: note = Table B: HLA-DPA1*03:01-B1*04:02L
  source 1..16: note = Severe acute respiratory syndrome coronavirus 2
FQTLLALHRSYLTPGD

SEQ ID NO: 21340 - protein, 15 aa, Severe acute respiratory syndrome-related coronavirus
  REGION 1..15: note = Table B: HLA-DPA1*03:01-B1*04:02L HLA-DRB1*14:02L HLA-DQA1*05:05-B1*03:19L HLA-DPA1*01:03-B1*04:02L
  source 1..15: note = Severe acute respiratory syndrome coronavirus 2
TLLALHRSYLTPGDS

SEQ ID NO: 21341 - protein, 13 aa, Severe acute respiratory syndrome-related coronavirus
  REGION 1..13: note = Table B: HLA-DPA1*03:01-B1*04:02L HLA-DPA1*01:03-B1*04:02L HLA-DQA1*03:01-B1*03:02L
  source 1..13: note = Severe acute respiratory syndrome coronavirus 2
SSSGWTAGAAAYY

SEQ ID NO: 21342 - protein, 14 aa, Severe acute respiratory syndrome-related coronavirus
  REGION 1..14: note = Table B: HLA-DPA1*03:01-B1*04:02L HLA-DRB1*09:01L HLA-DPA1*01:03-B1*104:01L
  source 1..14: note = Severe acute respiratory syndrome coronavirus 2
FRVQPTESIVRFPN

SEQ ID NO: 21343 - protein, 14 aa, Severe acute respiratory syndrome-related coronavirus
  REGION 1..14: note = Table B: HLA-DPA1*03:01-B1*04:02L HLA-DRB1*11:02L HLA-DRB1*08:01L HLA-DRB5*01:01L HLA-DRB4*01:01L HLA-DPA1*01:03-B1*04:02L HLA-DRB3*01:01L HLA-DPA1*02:01-B1*13:01L HLA-DPA1*01:03-B1*104:01L
  REGION 1..14: note = CONT. FROM ABOVE: HLA-DRB1*08:02L HLA-DRB1*15:01L
  source 1..14: note = Severe acute respiratory syndrome coronavirus 2
STEIYQAGSTPCNG

SEQ ID NO: 21344 - protein, 12 aa, Severe acute respiratory syndrome-related coronavirus
  REGION 1..12: note = Table B: HLA-DPA1*03:01-B1*04:02L HLA-DRB1*14:01L HLA-DRB1*12:01L HLA-DRB1*16:01L
  source 1..12: note = Severe acute respiratory syndrome coronavirus 2
YQPYRVVVLSFE

SEQ ID NO: 21345 - protein, 13 aa, Severe acute respiratory syndrome-related coronavirus
  REGION 1..13: note = Table B: HLA-DPA1*03:01-B1*04:02L
  source 1..13: note = Severe acute respiratory syndrome coronavirus 2
QPYRVVVLSFELL

SEQ ID NO: 21346 - protein, 12 aa, Severe acute respiratory syndrome-related coronavirus
  REGION 1..12: note = Table B: HLA-DPA1*03:01-B1*04:02L HLA-DPA1*03:01-B1*105:01L HLA-DPA1*01:02-B1*04:01L
  source 1..12: note = Severe acute respiratory syndrome coronavirus 2
VVLSFELLHAPA

SEQ ID NO: 21347 - protein, 15 aa, Severe acute respiratory syndrome-related coronavirus
  REGION 1..15: note = Table B: HLA-DPA1*03:01-B1*04:02L HLA-DRB1*03:01L HLA-DRB1*11:02L HLA-DRB1*08:01L HLA-DPA1*01:03-B1*104:01L HLA-DQA1*01:03-B1*06:01L HLA-DRB1*08:02L
  source 1..15: note = Severe acute respiratory syndrome coronavirus 2
ENSVAYSNNSIAIPT

SEQ ID NO: 21348 - protein, 12 aa, Severe acute respiratory syndrome-related coronavirus
  REGION 1..12: note = Table B: HLA-DPA1*03:01-B1*04:02L HLA-DPA1*03:01-B1*105:01L
  source 1..12: note = Severe acute respiratory syndrome coronavirus 2
LLLQYGSFCTQL

SEQ ID NO: 21349 - protein, 16 aa, Severe acute respiratory syndrome-related coronavirus
  REGION 1..16: note = Table B: HLA-DPA1*03:01-B1*04:02L HLA-DPA1*01:03-B1*04:02L HLA-DPA1*01:03-B1*104:01L
  source 1..16: note = Severe acute respiratory syndrome coronavirus 2
KQIYKTPPIKDFGGFN

SEQ ID NO: 21350 - protein, 11 aa, Severe acute respiratory syndrome-related coronavirus
  REGION 1..11: note = Table B: HLA-DPA1*03:01-B1*04:02L HLA-DPA1*03:01-B1*105:01L HLA-DPA1*01:02-B1*04:01L
  source 1..11: note = Severe acute respiratory syndrome coronavirus 2
DLICAQKFNGL

SEQ ID NO: 21351 - protein, 11 aa, Severe acute respiratory syndrome-related coronavirus
  REGION 1..11: note = Table B: HLA-DPA1*03:01-B1*04:02L HLA-DPA1*03:01-B1*105:01L
  source 1..11: note = Severe acute respiratory syndrome coronavirus 2
LICAQKFNGLT

SEQ ID NO: 21352 - protein, 16 aa, Severe acute respiratory syndrome-related coronavirus
  REGION 1..16: note = Table B: HLA-DPA1*03:01-B1*04:02L HLA-DRB1*14:02L
  source 1..16: note = Severe acute respiratory syndrome coronavirus 2
SGWTFGAGAALQIPFA

SEQ ID NO: 21353 - protein, 13 aa, Severe acute respiratory syndrome-related coronavirus
  REGION 1..13: note = Table B: HLA-DPA1*03:01-B1*04:02L HLA-DRB1*12:01L HLA-DRB1*14:54L HLA-DRB1*14:17L
  source 1..13: note = Severe acute respiratory syndrome coronavirus 2
TQNVLYENQKLIA

SEQ ID NO: 21354 - protein, 12 aa, Severe acute respiratory syndrome-related coronavirus
  REGION 1..12: note = Table B: HLA-DPA1*03:01-B1*04:02L
  source 1..12: note = Severe acute respiratory syndrome coronavirus 2
SANLAATKMSEC

SEQ ID NO: 21355 - protein, 11 aa, Severe acute respiratory syndrome-related coronavirus
  REGION 1..11: note = Table B: HLA-DPA1*03:01-B1*04:02L HLA-DPA1*03:01-B1*105:01L
  source 1..11: note = Severe acute respiratory syndrome coronavirus 2
VFLHVTYVPAQ

SEQ ID NO: 21356 - protein, 16 aa, Severe acute respiratory syndrome-related coronavirus
  REGION 1..16: note = Table B: HLA-DPA1*03:01-B1*04:02L
  source 1..16: note = Severe acute respiratory syndrome coronavirus 2
AQEKNFTTAPAICHDG

SEQ ID NO: 21357 - protein, 12 aa, Severe acute respiratory syndrome-related coronavirus
  REGION 1..12: note = Table B: HLA-DPA1*03:01-B1*04:02L HLA-DPA1*02:01-B1*13:01L
  source 1..12: note = Severe acute respiratory syndrome coronavirus 2
WFVTQRNFYEPQ

SEQ ID NO: 21358 - protein, 13 aa, Severe acute respiratory syndrome-related coronavirus
  REGION 1..13: note = Table B: HLA-DPA1*03:01-B1*04:02L HLA-DQA1*01:03-B1*06:01L
  source 1..13: note = Severe acute respiratory syndrome coronavirus 2
FVTQRNFYEPQII

SEQ ID NO: 21359 - protein, 13 aa, Severe acute respiratory syndrome-related coronavirus
  REGION 1..13: note = Table B: HLA-DPA1*03:01-B1*04:02L
  source 1..13: note = Severe acute respiratory syndrome coronavirus 2
NASVVNIQKEIDR

SEQ ID NO: 21360 - protein, 14 aa, Severe acute respiratory syndrome-related coronavirus
  REGION 1..14: note = Table B: HLA-DPA1*03:01-B1*04:02L
  source 1..14: note = Severe acute respiratory syndrome coronavirus 2
ASVVNIQKEIDRLN

SEQ ID NO: 21361 - protein, 14 aa, Severe acute respiratory syndrome-related coronavirus
  REGION 1..14: note = Table B: HLA-DPA1*03:01-B1*04:02L HLA-DRB1*11:02L HLA-DRB1*14:02L HLA-DQA1*05:05-B1*03:19L HLA-DQA1*05:05-B1*03:116L HLA-DPA1*01:03-B1*04:02L HLA-DPA1*01:03-B1*02:01L HLA-DQA1*05:05-B1*03:01L
  REGION 1..14: note = CONT. FROM ABOVE: HLA-DRB1*07:01L HLA-DRB1*10:01L HLA-DRB1*08:02 L
  source 1..14: note = Severe acute respiratory syndrome coronavirus 2
IDRLNEVAKNLNES

SEQ ID NO: 21362 - protein, 13 aa, Severe acute respiratory syndrome-related coronavirus
  REGION 1..13: note = Table B: HLA-DPA1*03:01-B1*04:02L HLA-DPA1*03:01-B1*105:01L
  source 1..13: note = Severe acute respiratory syndrome coronavirus 2
EQYIKWPWYIWLG

SEQ ID NO: 21363 - protein, 16 aa, Severe acute respiratory syndrome-related coronavirus
  REGION 1..16: note = Table B: HLA-DPA1*03:01-B1*04:02L HLA-DRB1*03:01L
  source 1..16: note = Severe acute respiratory syndrome coronavirus 2
ASKIITLKKRWQLALS

SEQ ID NO: 21364 - protein, 10 aa, Severe acute respiratory syndrome-related coronavirus
  REGION 1..10: note = Table B: HLA-DPA1*03:01-B1*04:02L HLA-DPA1*03:01-B1*105:01L HLA-DPA1*01:02-B1*04:01L HLA-DRB1*15:03L
  source 1..10: note = Severe acute respiratory syndrome coronavirus 2
LLFVTVYSHL

SEQ ID NO: 21365 - protein, 10 aa, Severe acute respiratory syndrome-related coronavirus
  REGION 1..10: note = Table B: HLA-DPA1*03:01-B1*04:02L HLA-DQA1*05:01-B1*02:01L HLA-DPA1*01:03-B1*04:01L HLA-DRB1*12:01L HLA-DPA1*03:01-B1*105:01L HLA-DPA1*01:02-B1*04:01L HLA-DRB1*16:01L HLA-DQA1*01:03-B1*06:01L
  REGION 1..10: note = CONT. FROM ABOVE: HLA-DQA1*02:01-B1*03:03L HLA-DRB1*15:03L
  source 1..10: note = Severe acute respiratory syndrome coronavirus 2
LFVTVYSHLL

SEQ ID NO: 21366 - protein, 10 aa, Severe acute respiratory syndrome-related coronavirus
  REGION 1..10: note = Table B: HLA-DPA1*03:01-B1*04:02L HLA-DPA1*01:03-B1*04:02L HLA-DPA1*03:01-B1*105:01L HLA-DPA1*01:02-B1*04:01L HLA-DQA1*01:03-B1*06:01L
  source 1..10: note = Severe acute respiratory syndrome coronavirus 2
VYSHLLLVAA

SEQ ID NO: 21367 - protein, 11 aa, Severe acute respiratory syndrome-related coronavirus
  REGION 1..11: note = Table B: HLA-DPA1*03:01-B1*04:02L HLA-DPA1*03:01-B1*105:01L HLA-DPA1*01:02-B1*04:01L
  source 1..11: note = Severe acute respiratory syndrome coronavirus 2
YALVYFLQSIN

SEQ ID NO: 21368 - protein, 10 aa, Severe acute respiratory syndrome-related coronavirus
  REGION 1..10: note = Table B: HLA-DPA1*03:01-B1*04:02L HLA-DPA1*01:02-B1*04:01L
  source 1..10: note = Severe acute respiratory syndrome coronavirus 2
YDANYFLCWH

SEQ ID NO: 21369 - protein, 13 aa, Severe acute respiratory syndrome-related coronavirus
  REGION 1..13: note = Table B: HLA-DPA1*03:01-B1*04:02L HLA-DRB1*14:01L HLA-DRB1*12:01L HLA-DPA1*01:02-B1*04:01L
  source 1..13: note = Severe acute respiratory syndrome coronavirus 2
DTGVEHVTFFIYN

SEQ ID NO: 21370 - protein, 13 aa, Severe acute respiratory syndrome-related coronavirus
  REGION 1..13: note = Table B: HLA-DPA1*03:01-B1*04:02L HLA-DPA1*03:01-B1*105:01L HLA-DPA1*01:02-B1*04:01L
  source 1..13: note = Severe acute respiratory syndrome coronavirus 2
VEHVTFFIYNKIV

SEQ ID NO: 21371 - protein, 12 aa, Severe acute respiratory syndrome-related coronavirus
  REGION 1..12: note = Table B: HLA-DPA1*03:01-B1*04:02L HLA-DPA1*03:01-B1*105:01L HLA-DPA1*01:02-B1*04:01L HLA-DRB1*15:03L
  source 1..12: note = Severe acute respiratory syndrome coronavirus 2
HVTFFIYNKIVD

SEQ ID NO: 21372 - protein, 10 aa, Severe acute respiratory syndrome-related coronavirus
  REGION 1..10: note = Table B: HLA-DPA1*03:01-B1*04:02L HLA-DQA1*01-B1*05L HLA-DPA1*03:01-B1*105:01L HLA-DPA1*01:02-B1*04:01L HLA-DQA1*01:03-B1*06:01L
  source 1..10: note = Severe acute respiratory syndrome coronavirus 2
FIYNKIVDEP

SEQ ID NO: 21373 - protein, 11 aa, Severe acute respiratory syndrome-related coronavirus
  REGION 1..11: note = Table B: HLA-DPA1*03:01-B1*04:02L
  source 1..11: note = Severe acute respiratory syndrome coronavirus 2
GVVNPVMEPIY

SEQ ID NO: 21374 - protein, 11 aa, Severe acute respiratory syndrome-related coronavirus
  REGION 1..11: note = Table B: HLA-DPA1*03:01-B1*04:02L HLA-DQA1*05:05-B1*03:116L HLA-DQA1*03:01-B1*03:02L HLA-DPA1*01:03-B1*104:01L HLA-DPA1*01:02-B1*04:01L
  source 1..11: note = Severe acute respiratory syndrome coronavirus 2
EETGTLIVNSV

SEQ ID NO: 21375 - protein, 11 aa, Severe acute respiratory syndrome-related coronavirus
  REGION 1..11: note = Table B: HLA-DPA1*03:01-B1*04:02L HLA-DQA1*05:01-B1*02:01L HLA-DRB1*12:01L
  source 1..11: note = Severe acute respiratory syndrome coronavirus 2
GTLIVNSVLLF

SEQ ID NO: 21376 - protein, 11 aa, Severe acute respiratory syndrome-related coronavirus
  REGION 1..11: note = Table B: HLA-DPA1*03:01-B1*04:02L HLA-DRB1*12:01L HLA-DPA1*03:01-B1*105:01L
  source 1..11: note = Severe acute respiratory syndrome coronavirus 2
AILTALRLCAY

SEQ ID NO: 21377 - protein, 11 aa, Severe acute respiratory syndrome-related coronavirus
  REGION 1..11: note = Table B: HLA-DPA1*03:01-B1*04:02L
  source 1..11: note = Severe acute respiratory syndrome coronavirus 2
MWLSYFIASFR

SEQ ID NO: 21378 - protein, 11 aa, Severe acute respiratory syndrome-related coronavirus
  REGION 1..11: note = Table B: HLA-DPA1*03:01-B1*04:02L HLA-DPA1*03:01-B1*105:01L HLA-DQA1*01:03-B1*06:01L HLA-DRB1*04:08L
  source 1..11: note = Severe acute respiratory syndrome coronavirus 2
TILTRPLLESE

SEQ ID NO: 21379 - protein, 13 aa, Severe acute respiratory syndrome-related coronavirus
  REGION 1..13: note = Table B: HLA-DPA1*03:01-B1*04:02L HLA-DPA1*02:01-B1*13:01L
  source 1..13: note = Severe acute respiratory syndrome coronavirus 2
YYKLGASQRVAGD

SEQ ID NO: 21380 - protein, 13 aa, Severe acute respiratory syndrome-related coronavirus
  REGION 1..13: note = Table B: HLA-DPA1*03:01-B1*04:02L HLA-DRB1*14:02L HLA-DPA1*01:03-B1*04:01L HLA-DPA1*01:03-B1*04:02L HLA-DPA1*01:02-B1*04:01L
  source 1..13: note = Severe acute respiratory syndrome coronavirus 2
VAGDSGFAAYSRY

SEQ ID NO: 21381 - protein, 15 aa, Severe acute respiratory syndrome-related coronavirus
  REGION 1..15: note = Table B: HLA-DPA1*03:01-B1*04:02L
  source 1..15: note = Severe acute respiratory syndrome coronavirus 2
SRYRIGNYKLNTDHS

SEQ ID NO: 21382 - protein, 12 aa, Severe acute respiratory syndrome-related coronavirus
  REGION 1..12: note = Table B: HLA-DPA1*03:01-B1*04:02L HLA-DQA1*05:01-B1*02:01L HLA-DPA1*01:03-B1*04:01L HLA-DPA1*03:01-B1*105:01L HLA-DRB1*15:03L
  source 1..12: note = Severe acute respiratory syndrome coronavirus 2
VSIWNLDYIINL

SEQ ID NO: 21383 - protein, 12 aa, Severe acute respiratory syndrome-related coronavirus
  REGION 1..12: note = Table B: HLA-DPA1*03:01-B1*04:02L HLA-DPA1*03:01-B1*105:01L HLA-DRB1*15:03L
  source 1..12: note = Severe acute respiratory syndrome coronavirus 2
WNLDYIINLIIK

SEQ ID NO: 21384 - protein, 12 aa, Severe acute respiratory syndrome-related coronavirus
  REGION 1..12: note = Table B: HLA-DPA1*03:01-B1*04:02L
  source 1..12: note = Severe acute respiratory syndrome coronavirus 2
VQELYSPIFLIV

SEQ ID NO: 21385 - protein, 11 aa, Severe acute respiratory syndrome-related coronavirus
  REGION 1..11: note = Table B: HLA-DPA1*03:01-B1*04:02L
  source 1..11: note = Severe acute respiratory syndrome coronavirus 2
ELYSPIFLIVA

SEQ ID NO: 21386 - protein, 12 aa, Severe acute respiratory syndrome-related coronavirus
  REGION 1..12: note = Table B: HLA-DPA1*03:01-B1*04:02L HLA-DQA1*01-B1*05L HLA-DPA1*01:03-B1*04:02L
  source 1..12: note = Severe acute respiratory syndrome coronavirus 2
IFWFSLELQDHN

SEQ ID NO: 21387 - protein, 12 aa, Severe acute respiratory syndrome-related coronavirus
  REGION 1..12: note = Table B: HLA-DPA1*03:01-B1*04:02L HLA-DPA1*01:03-B1*04:02L HLA-DPA1*01:02-B1*04:01L
  source 1..12: note = Severe acute respiratory syndrome coronavirus 2
FWFSLELQDHNE

SEQ ID NO: 21388 - protein, 10 aa, Severe acute respiratory syndrome-related coronavirus
  REGION 1..10: note = Table B: HLA-DPA1*03:01-B1*04:02L HLA-DPA1*01:03-B1*04:01L HLA-DPA1*01:03-B1*04:02L HLA-DPA1*03:01-B1*105:01L HLA-DPA1*01:02-B1*04:01L HLA-DRB1*16:01L HLA-DRB1*04:08L
  source 1..10: note = Severe acute respiratory syndrome coronavirus 2
FYSKWYIRVG

SEQ ID NO: 21389 - protein, 16 aa, Severe acute respiratory syndrome-related coronavirus
  REGION 1..16: note = Table B: HLA-DPA1*03:01-B1*04:02L HLA-DPA1*01:03-B1*104:01L HLA-DRB1*15:01L
  source 1..16: note = Severe acute respiratory syndrome coronavirus 2
YSKWYIRVGARKSAPL

SEQ ID NO: 21390 - protein, 13 aa, Severe acute respiratory syndrome-related coronavirus
  REGION 1..13: note = Table B: HLA-DPA1*03:01-B1*04:02L HLA-DPA1*03:01-B1*105:01L
  source 1..13: note = Severe acute respiratory syndrome coronavirus 2
GSLVVRCSFYEDF

SEQ ID NO: 21391 - protein, 12 aa, Severe acute respiratory syndrome-related coronavirus
  REGION 1..12: note = Table B: HLA-DPA1*03:01-B1*04:02L HLA-DPA1*03:01-B1*105:01L
  source 1..12: note = Severe acute respiratory syndrome coronavirus 2
LVVRCSFYEDFL

SEQ ID NO: 21392 - protein, 10 aa, Severe acute respiratory syndrome-related coronavirus
  REGION 1..10: note = Table B: HLA-DPA1*03:01-B1*04:02L HLA-DQA1*01-B1*05L HLA-DPA1*01:03-B1*04:01L HLA-DPA1*01:03-B1*04:02L HLA-DPA1*03:01-B1*105:01L HLA-DPA1*01:02-B1*04:01L HLA-DRB1*16:01L HLA-DQA1*01:03-B1*06:01L HLA-DRB1*04:08L
  source 1..10: note = Severe acute respiratory syndrome coronavirus 2
SFYEDFLEYH

SEQ ID NO: 21393 - protein, 15 aa, Severe acute respiratory syndrome-related coronavirus
  REGION 1..15: note = Table B: HLA-DPA1*03:01-B1*04:02L HLA-DQA1*01-B1*05L HLA-DPA1*01:02-B1*04:01L
  source 1..15: note = Severe acute respiratory syndrome coronavirus 2
GANKDGIIWVATEGA

SEQ ID NO: 21394 - protein, 10 aa, Severe acute respiratory syndrome-related coronavirus
  REGION 1..10: note = Table B: HLA-DPA1*03:01-B1*04:02L
  source 1..10: note = Severe acute respiratory syndrome coronavirus 2
ALALLLLDRL

SEQ ID NO: 21395 - protein, 16 aa, Severe acute respiratory syndrome-related coronavirus
  REGION 1..16: note = Table B: HLA-DPA1*03:01-B1*04:02L HLA-DPA1*01:03-B1*04:02L
  source 1..16: note = Severe acute respiratory syndrome coronavirus 2
ELIRQGTDYKHWPQIA

SEQ ID NO: 21396 - protein, 13 aa, Severe acute respiratory syndrome-related coronavirus
  REGION 1..13: note = Table B: HLA-DPA1*03:01-B1*04:02L HLA-DPA1*03:01-B1*105:01L
  source 1..13: note = Severe acute respiratory syndrome coronavirus 2
GTDYKHWPQIAQF

SEQ ID NO: 21397 - protein, 11 aa, Severe acute respiratory syndrome-related coronavirus
  REGION 1..11: note = Table B: HLA-DPA1*03:01-B1*04:02L HLA-DRB1*11:02L
  source 1..11: note = Severe acute respiratory syndrome coronavirus 2
VILLNKHIDAY

SEQ ID NO: 21398 - protein, 13 aa, Severe acute respiratory syndrome-related coronavirus
  REGION 1..13: note = Table B: HLA-DPA1*03:01-B1*04:02L
  source 1..13: note = Severe acute respiratory syndrome coronavirus 2
TVTLLPAADLDDF

SEQ ID NO: 21399 - protein, 10 aa, Severe acute respiratory syndrome-related coronavirus
  REGION 1..10: note = Table B: HLA-DPA1*03:01-B1*04:02L HLA-DPA1*03:01-B1*105:01L HLA-DQA1*01:03-B1*06:01L HLA-DRB1*15:03L
  source 1..10: note = Severe acute respiratory syndrome coronavirus 2
AFPFTIYSLL

SEQ ID NO: 21400 - protein, 11 aa, Severe acute respiratory syndrome-related coronavirus
  REGION 1..11: note = Table B: HLA-DPA1*03:01-B1*04:02L HLA-DPA1*01:02-B1*04:01L
  source 1..11: note = Severe acute respiratory syndrome coronavirus 2
PFTIYSLLLCR

SEQ ID NO: 21401 - protein, 11 aa, Severe acute respiratory syndrome-related coronavirus
  REGION 1..11: note = Table B: HLA-DPA1*03:01-B1*04:02L HLA-DPA1*03:01-B1*105:01L HLA-DPA1*01:02-B1*04:01L
  source 1..11: note = Severe acute respiratory syndrome coronavirus 2
TIYSLLLCRMN

SEQ ID NO: 21402 - protein, 16 aa, Severe acute respiratory syndrome-related coronavirus
  REGION 1..16: note = Table B: HLA-DRB1*03:01L
  source 1..16: note = Severe acute respiratory syndrome coronavirus 2
EIPVAYRKVLLRKNGN

SEQ ID NO: 21403 - protein, 18 aa, Severe acute respiratory syndrome-related coronavirus
  REGION 1..18: note = Table B: HLA-DRB1*03:01L HLA-DRB1*11:02L HLA-DRB1*11:03L HLA-DRB1*14:02L HLA-DQA1*05:05-B1*03:19L HLA-DQA1*05:01-B1*02:01L HLA-DRB4*01:01L HLA-DPA1*01:03-B1*04:01L HLA-DRB1*09:01L HLA-DRB1*08:02L
  source 1..18: note = Severe acute respiratory syndrome coronavirus 2
GPDGYPLECIKDLLARAG

SEQ ID NO: 21404 - protein, 15 aa, Severe acute respiratory syndrome-related coronavirus
  REGION 1..15: note = Table B: HLA-DRB1*03:01L
  source 1..15: note = Severe acute respiratory syndrome coronavirus 2
FPLNSIIKTIQPRVE

SEQ ID NO: 21405 - protein, 16 aa, Severe acute respiratory syndrome-related coronavirus
  REGION 1..16: note = Table B: HLA-DRB1*03:01L HLA-DPA1*02:01-B1*13:01L
  source 1..16: note = Severe acute respiratory syndrome coronavirus 2
IIKTIQPRVEKKKLDG

SEQ ID NO: 21406 - protein, 17 aa, Severe acute respiratory syndrome-related coronavirus
  REGION 1..17: note = Table B: HLA-DRB1*03:01L
  source 1..17: note = Severe acute respiratory syndrome coronavirus 2
VFSYVGCHNKCAYWVPR

SEQ ID NO: 21407 - protein, 15 aa, Severe acute respiratory syndrome-related coronavirus
  REGION 1..15: note = Table B: HLA-DRB1*03:01L HLA-DRB1*13:01L HLA-DPA1*01:03-B1*104:01L
  source 1..15: note = Severe acute respiratory syndrome coronavirus 2
DNLLEILQKEKVNIN

SEQ ID NO: 21408 - protein, 14 aa, Severe acute respiratory syndrome-related coronavirus
  REGION 1..14: note = Table B: HLA-DRB1*03:01L HLA-DRB1*11:02L HLA-DRB4*01:01L HLA-DQA1*05:05-B1*03:116L HLA-DPA1*01:03-B1*02:01L HLA-DRB1*08:02L
  source 1..14: note = Severe acute respiratory syndrome coronavirus 2
SPLYAFASEAARVV

SEQ ID NO: 21409 - protein, 12 aa, Severe acute respiratory syndrome-related coronavirus
  REGION 1..12: note = Table B: HLA-DRB1*03:01L HLA-DPA1*01:03-B1*104:01L
  source 1..12: note = Severe acute respiratory syndrome coronavirus 2
YAFASEAARVVR

SEQ ID NO: 21410 - protein, 13 aa, Severe acute respiratory syndrome-related coronavirus
  REGION 1..13: note = Table B: HLA-DRB1*03:01L HLA-DRB1*11:03L
  source 1..13: note = Severe acute respiratory syndrome coronavirus 2
FSRTLETAQNSVR

SEQ ID NO: 21411 - protein, 15 aa, Severe acute respiratory syndrome-related coronavirus
  REGION 1..15: note = Table B: HLA-DRB1*03:01L HLA-DRB1*11:02L
  source 1..15: note = Severe acute respiratory syndrome coronavirus 2
VGGQIVTCAKEIKES

SEQ ID NO: 21412 - protein, 16 aa, Severe acute respiratory syndrome-related coronavirus
  REGION 1..16: note = Table B: HLA-DRB1*03:01L HLA-DRB4*01:01L HLA-DRB1*09:01L
  source 1..16: note = Severe acute respiratory syndrome coronavirus 2
APTKVTFGDDTVIEVQ

SEQ ID NO: 21413 - protein, 15 aa, Severe acute respiratory syndrome-related coronavirus
  REGION 1..15: note = Table B: HLA-DRB1*03:01L HLA-DRB1*11:01L
  source 1..15: note = Severe acute respiratory syndrome coronavirus 2
VQPQLEMELTPVVQT

SEQ ID NO: 21414 - protein, 14 aa, Severe acute respiratory syndrome-related coronavirus
  REGION 1..14: note = Table B: HLA-DRB1*03:01L
  source 1..14: note = Severe acute respiratory syndrome coronavirus 2
TDNVYIKNADIVEE

SEQ ID NO: 21415 - protein, 14 aa, Severe acute respiratory syndrome-related coronavirus
  REGION 1..14: note = Table B: HLA-DRB1*03:01L HLA-DRB1*11:02L HLA-DRB1*13:01L HLA-DQA1*05:05-B1*03:116L HLA-DRB1*15:01L
  source 1..14: note = Severe acute respiratory syndrome coronavirus 2
DNVYIKNADIVEEA

SEQ ID NO: 21416 - protein, 14 aa, Severe acute respiratory syndrome-related coronavirus
  REGION 1..14: note = Table B: HLA-DRB1*03:01L HLA-DRB1*14:02L HLA-DRB1*13:01L HLA-DPA1*03:01-B1*105:01L HLA-DPA1*01:03-B1*02:01L
  source 1..14: note = Severe acute respiratory syndrome coronavirus 2
NADIVEEAKKVKPT

SEQ ID NO: 21417 - protein, 12 aa, Severe acute respiratory syndrome-related coronavirus
  REGION 1..12: note = Table B: HLA-DRB1*03:01L HLA-DRB4*02:01NL HLA-DRB1*13:01L HLA-DRB4*01:01L
  source 1..12: note = Severe acute respiratory syndrome coronavirus 2
SDDYIATNGPLK

SEQ ID NO: 21418 - protein, 14 aa, Severe acute respiratory syndrome-related coronavirus
  REGION 1..14: note = Table B: HLA-DRB1*03:01L HLA-DPA1*01:03-B1*04:02L HLA-DRB1*07:01L HLA-DRB1*08:02L
  source 1..14: note = Severe acute respiratory syndrome coronavirus 2
SFLEMKSEKQVEQK

SEQ ID NO: 21419 - protein, 14 aa, Severe acute respiratory syndrome-related coronavirus
  REGION 1..14: note = Table B: HLA-DRB1*03:01L HLA-DRB1*11:02L HLA-DQA1*01:01-B1*05:01L HLA-DRB1*04:10L
  source 1..14: note = Severe acute respiratory syndrome coronavirus 2
VTTTLEETKFLTEN

SEQ ID NO: 21420 - protein, 13 aa, Severe acute respiratory syndrome-related coronavirus
  REGION 1..13: note = Table B: HLA-DRB1*03:01L HLA-DQA1*05:05-B1*03:19L
  source 1..13: note = Severe acute respiratory syndrome coronavirus 2
LLYIDINGNLHPD

SEQ ID NO: 21421 - protein, 13 aa, Severe acute respiratory syndrome-related coronavirus
  REGION 1..13: note = Table B: HLA-DRB1*03:01L
  source 1..13: note = Severe acute respiratory syndrome coronavirus 2
NGYTVEEAKTVLK

SEQ ID NO: 21422 - protein, 14 aa, Severe acute respiratory syndrome-related coronavirus
  REGION 1..14: note = Table B: HLA-DRB1*03:01L HLA-DRB1*11:02L HLA-DRB1*15:01L
  source 1..14: note = Severe acute respiratory syndrome coronavirus 2
KSAFYILPSIISNE

SEQ ID NO: 21423 - protein, 14 aa, Severe acute respiratory syndrome-related coronavirus
  REGION 1..14: note = Table B: HLA-DRB1*03:01L HLA-DRB1*11:02L HLA-DRB1*13:01L HLA-DPA1*01:03-B1*04:01L HLA-DQA1*05:05-B1*03:116L HLA-DRB1*15:01L
  source 1..14: note = Severe acute respiratory syndrome coronavirus 2
SAFYILPSIISNEK

SEQ ID NO: 21424 - protein, 14 aa, Severe acute respiratory syndrome-related coronavirus
  REGION 1..14: note = Table B: HLA-DRB1*03:01L HLA-DQA1*01:01-B1*05:01L HLA-DRB1*11:01L HLA-DRB5*01:01L HLA-DPA1*01:03-B1*04:02L
  source 1..14: note = Severe acute respiratory syndrome coronavirus 2
EKQEILGTVSWNLR

SEQ ID NO: 21425 - protein, 14 aa, Severe acute respiratory syndrome-related coronavirus
  REGION 1..14: note = Table B: HLA-DRB1*03:01L
  source 1..14: note = Severe acute respiratory syndrome coronavirus 2
LREMLAHAEETRKL

SEQ ID NO: 21426 - protein, 16 aa, Severe acute respiratory syndrome-related coronavirus
  REGION 1..16: note = Table B: HLA-DRB1*03:01L
  source 1..16: note = Severe acute respiratory syndrome coronavirus 2
REMLAHAEETRKLMPV

SEQ ID NO: 21427 - protein, 16 aa, Severe acute respiratory syndrome-related coronavirus
  REGION 1..16: note = Table B: HLA-DRB1*03:01L HLA-DRB1*11:01L
  source 1..16: note = Severe acute respiratory syndrome coronavirus 2
VSTIQRKYKGIKIQEG

SEQ ID NO: 21428 - protein, 16 aa, Severe acute respiratory syndrome-related coronavirus
  REGION 1..16: note = Table B: HLA-DRB1*03:01L HLA-DRB1*11:02L HLA-DRB3*01:01L HLA-DPA1*01:03-B1*02:01L HLA-DPA1*01:03-B1*104:01L HLA-DRB1*08:02L HLA-DRB1*15:01L
  source 1..16: note = Severe acute respiratory syndrome coronavirus 2
VTAYNGYLTSSSKTPE

SEQ ID NO: 21429 - protein, 14 aa, Severe acute respiratory syndrome-related coronavirus
  REGION 1..14: note = Table B: HLA-DRB1*03:01L HLA-DRB1*11:02L HLA-DRB4*01:01L
  source 1..14: note = Severe acute respiratory syndrome coronavirus 2
NGYLTSSSKTPEEH

SEQ ID NO: 21430 - protein, 17 aa, Severe acute respiratory syndrome-related coronavirus
  REGION 1..17: note = Table B: HLA-DRB1*03:01L
  source 1..17: note = Severe acute respiratory syndrome coronavirus 2
TPEEHFIETISLAGSYK

SEQ ID NO: 21431 - protein, 14 aa, Severe acute respiratory syndrome-related coronavirus
  REGION 1..14: note = Table B: HLA-DRB1*03:01L HLA-DRB1*11:02L HLA-DRB3*01:01L
  source 1..14: note = Severe acute respiratory syndrome coronavirus 2
VYYTSNPTTFHLDG

SEQ ID NO: 21432 - protein, 13 aa, Severe acute respiratory syndrome-related coronavirus
  REGION 1..13: note = Table B: HLA-DRB1*03:01L HLA-DRB1*11:01L HLA-DRB3*01:01L HLA-DPA1*01:03-B1*02:01L HLA-DPA1*01:03-B1*104:01L
  source 1..13: note = Severe acute respiratory syndrome coronavirus 2
IKVFTTVDNINLH

SEQ ID NO: 21433 - protein, 14 aa, Severe acute respiratory syndrome-related coronavirus
  REGION 1..14: note = Table B: HLA-DRB1*03:01L HLA-DRB1*11:02L HLA-DRB4*01:01L HLA-DPA1*01:03-B1*02:01L HLA-DRB1*08:02L HLA-DRB1*15:01L
  source 1..14: note = Severe acute respiratory syndrome coronavirus 2
GKTFYVLPNDDTLR

SEQ ID NO: 21434 - protein, 13 aa, Severe acute respiratory syndrome-related coronavirus
  REGION 1..13: note = Table B: HLA-DRB1*03:01L HLA-DRB1*07:01L HLA-DQA1*01:03-B1*06:01L
  source 1..13: note = Severe acute respiratory syndrome coronavirus 2
IELKFNPPALQDA

SEQ ID NO: 21435 - protein, 13 aa, Severe acute respiratory syndrome-related coronavirus
  REGION 1..13: note = Table B: HLA-DRB1*03:01L HLA-DRB1*11:02L HLA-DPA1*01:03-B1*04:02L HLA-DQA1*01:03-B1*06:01L
  source 1..13: note = Severe acute respiratory syndrome coronavirus 2
ESPFVMMSAPPAQ

SEQ ID NO: 21436 - protein, 14 aa, Severe acute respiratory syndrome-related coronavirus
  REGION 1..14: note = Table B: HLA-DRB1*03:01L HLA-DQA1*01:01-B1*05:01L HLA-DRB4*01:01L HLA-DRB1*08:02L
  source 1..14: note = Severe acute respiratory syndrome coronavirus 2
NSYFTEQPIDLVPN

SEQ ID NO: 21437 - protein, 13 aa, Severe acute respiratory syndrome-related coronavirus
  REGION 1..13: note = Table B: HLA-DRB1*03:01L HLA-DRB1*08:01L HLA-DRB1*11:01L HLA-DRB1*12:02L
  source 1..13: note = Severe acute respiratory syndrome coronavirus 2
KVTFFPDLNGDVV

SEQ ID NO: 21438 - protein, 13 aa, Severe acute respiratory syndrome-related coronavirus
  REGION 1..13: note = Table B: HLA-DRB1*03:01L HLA-DRB5*01:01L
  source 1..13: note = Severe acute respiratory syndrome coronavirus 2
VTFFPDLNGDVVA

SEQ ID NO: 21439 - protein, 14 aa, Severe acute respiratory syndrome-related coronavirus
  REGION 1..14: note = Table B: HLA-DRB1*03:01L HLA-DRB1*11:02L HLA-DRB4*02:01NL HLA-DPA1*01:03-B1*02:01L HLA-DPA1*01:02-B1*04:01L HLA-DRB1*15:01L
  source 1..14: note = Severe acute respiratory syndrome coronavirus 2
SNSFDVLKSEDAQG

SEQ ID NO: 21440 - protein, 16 aa, Severe acute respiratory syndrome-related coronavirus
  REGION 1..16: note = Table B: HLA-DRB1*03:01L HLA-DPA1*02:01-B1*13:01L HLA-DPA1*03:01-B1*105:01L
  source 1..16: note = Severe acute respiratory syndrome coronavirus 2
SSLTIKKPNELSRVLG

SEQ ID NO: 21441 - protein, 16 aa, Severe acute respiratory syndrome-related coronavirus
  REGION 1..16: note = Table B: HLA-DRB1*03:01L HLA-DRB1*11:02L HLA-DPA1*01:03-B1*02:01L
  source 1..16: note = Severe acute respiratory syndrome coronavirus 2
VPWDTIANYAKPFLNK

SEQ ID NO: 21442 - protein, 14 aa, Severe acute respiratory syndrome-related coronavirus
  REGION 1..14: note = Table B: HLA-DRB1*03:01L HLA-DPA1*01:03-B1*02:01L
  source 1..14: note = Severe acute respiratory syndrome coronavirus 2
EASFNYLKSPNFSK

SEQ ID NO: 21443 - protein, 16 aa, Severe acute respiratory syndrome-related coronavirus
  REGION 1..16: note = Table B: HLA-DRB1*03:01L HLA-DRB1*13:01L
  source 1..16: note = Severe acute respiratory syndrome coronavirus 2
ASFYYVWKSYVHVVDG

SEQ ID NO: 21444 - protein, 12 aa, Severe acute respiratory syndrome-related coronavirus
  REGION 1..12: note = Table B: HLA-DRB1*03:01L HLA-DRB4*02:01NL HLA-DRB1*13:01L HLA-DPA1*01:03-B1*04:01L HLA-DPA1*01:03-B1*104:01L
  source 1..12: note = Severe acute respiratory syndrome coronavirus 2
GSTFISDEVARD

SEQ ID NO: 21445 - protein, 12 aa, Severe acute respiratory syndrome-related coronavirus
  REGION 1..12: note = Table B: HLA-DRB1*03:01L HLA-DRB1*13:01L HLA-DPA1*01:03-B1*02:01L
  source 1..12: note = Severe acute respiratory syndrome coronavirus 2
STFISDEVARDL

SEQ ID NO: 21446 - protein, 16 aa, Severe acute respiratory syndrome-related coronavirus
  REGION 1..16: note = Table B: HLA-DRB1*03:01L HLA-DRB1*11:02L HLA-DRB1*14:02L HLA-DRB1*08:03L
  source 1..16: note = Severe acute respiratory syndrome coronavirus 2
VARDLSLQFKRPINPT

SEQ ID NO: 21447 - protein, 14 aa, Severe acute respiratory syndrome-related coronavirus
  REGION 1..14: note = Table B: HLA-DRB1*03:01L
  source 1..14: note = Severe acute respiratory syndrome coronavirus 2
YIVDSVTVKNGSIH

SEQ ID NO: 21448 - protein, 14 aa, Severe acute respiratory syndrome-related coronavirus
  REGION 1..14: note = Table B: HLA-DRB1*03:01L HLA-DRB1*11:02L HLA-DRB4*01:01L HLA-DQA1*01:03-B1*06:01L HLA-DRB1*15:01L
  source 1..14: note = Severe acute respiratory syndrome coronavirus 2
LSHFVNLDNLRANN

SEQ ID NO: 21449 - protein, 14 aa, Severe acute respiratory syndrome-related coronavirus
  REGION 1..14: note = Table B: HLA-DRB1*03:01L HLA-DPA1*01:03-B1*04:02L
  source 1..14: note = Severe acute respiratory syndrome coronavirus 2
SHFVNLDNLRANNT

SEQ ID NO: 21450 - protein, 11 aa, Severe acute respiratory syndrome-related coronavirus
  REGION 1..11: note = Table B: HLA-DRB1*03:01L HLA-DRB3*01:01L HLA-DRB1*16:01L
  source 1..11: note = Severe acute respiratory syndrome coronavirus 2
VIVFDGKSKCE

SEQ ID NO: 21451 - protein, 14 aa, Severe acute respiratory syndrome-related coronavirus
  REGION 1..14: note = Table B: HLA-DRB1*03:01L HLA-DRB1*11:02L HLA-DRB4*01:01L HLA-DRB1*08:02L HLA-DRB1*15:01L
  source 1..14: note = Severe acute respiratory syndrome coronavirus 2
KTLVATAEAELAKN

SEQ ID NO: 21452 - protein, 16 aa, Severe acute respiratory syndrome-related coronavirus
  REGION 1..16: note = Table B: HLA-DRB1*03:01L
  source 1..16: note = Severe acute respiratory syndrome coronavirus 2
DNVLSTFISAARQGFV

SEQ ID NO: 21453 - protein, 14 aa, Severe acute respiratory syndrome-related coronavirus
  REGION 1..14: note = Table B: HLA-DRB1*03:01L
  source 1..14: note = Severe acute respiratory syndrome coronavirus 2
TFISAARQGFVDSD

SEQ ID NO: 21454 - protein, 18 aa, Severe acute respiratory syndrome-related coronavirus
  REGION 1..18: note = Table B: HLA-DRB1*03:01L
  source 1..18: note = Severe acute respiratory syndrome coronavirus 2
TRQVVNVVTTKIALKGGK

SEQ ID NO: 21455 - protein, 14 aa, Severe acute respiratory syndrome-related coronavirus
  REGION 1..14: note = Table B: HLA-DRB1*03:01L
  source 1..14: note = Severe acute respiratory syndrome coronavirus 2
AAIFYLITPVHVMS

SEQ ID NO: 21456 - protein, 14 aa, Severe acute respiratory syndrome-related coronavirus
  REGION 1..14: note = Table B: HLA-DRB1*03:01L
  source 1..14: note = Severe acute respiratory syndrome coronavirus 2
SEIIGYKAIDGGVT

SEQ ID NO: 21457 - protein, 12 aa, Severe acute respiratory syndrome-related coronavirus
  REGION 1..12: note = Table B: HLA-DRB1*03:01L
  source 1..12: note = Severe acute respiratory syndrome coronavirus 2
ESLRPDTRYVLM

SEQ ID NO: 21458 - protein, 12 aa, Severe acute respiratory syndrome-related coronavirus
  REGION 1..12: note = Table B: HLA-DRB1*03:01L
  source 1..12: note = Severe acute respiratory syndrome coronavirus 2
SLRPDTRYVLMD

SEQ ID NO: 21459 - protein, 14 aa, Severe acute respiratory syndrome-related coronavirus
  REGION 1..14: note = Table B: HLA-DRB1*03:01L HLA-DRB1*11:03L HLA-DRB1*14:02L HLA-DPA1*01:03-B1*104:01L
  source 1..14: note = Severe acute respiratory syndrome coronavirus 2
RWVLNNDYYRSLPG

SEQ ID NO: 21460 - protein, 15 aa, Severe acute respiratory syndrome-related coronavirus
  REGION 1..15: note = Table B: HLA-DRB1*03:01L HLA-DRB1*11:02L HLA-DRB5*01:01L HLA-DRB4*02:01NL HLA-DPA1*01:03-B1*04:02L HLA-DRB1*08:02L
  source 1..15: note = Severe acute respiratory syndrome coronavirus 2
TPLIQPIGALDISAS

SEQ ID NO: 21461 - protein, 14 aa, Severe acute respiratory syndrome-related coronavirus
  REGION 1..14: note = Table B: HLA-DRB1*03:01L HLA-DRB1*11:02L
  source 1..14: note = Severe acute respiratory syndrome coronavirus 2
FYLTNDVSFLAHIQ

SEQ ID NO: 21462 - protein, 17 aa, Severe acute respiratory syndrome-related coronavirus
  REGION 1..17: note = Table B: HLA-DRB1*03:01L
  source 1..17: note = Severe acute respiratory syndrome coronavirus 2
LKRRVVFNGVSFSTFEE

SEQ ID NO: 21463 - protein, 14 aa, Severe acute respiratory syndrome-related coronavirus
  REGION 1..14: note = Table B: HLA-DRB1*03:01L
  source 1..14: note = Severe acute respiratory syndrome coronavirus 2
NHNFLVQAGNVQLR

SEQ ID NO: 21464 - protein, 14 aa, Severe acute respiratory syndrome-related coronavirus
  REGION 1..14: note = Table B: HLA-DRB1*03:01L HLA-DQA1*01:01-B1*05:01L HLA-DPA1*02:01-B1*13:01L HLA-DRB1*07:01L HLA-DQA1*01:03-B1*06:01L
  source 1..14: note = Severe acute respiratory syndrome coronavirus 2
YGPFVDRQTAQAAG

SEQ ID NO: 21465 - protein, 16 aa, Severe acute respiratory syndrome-related coronavirus
  REGION 1..16: note = Table B: HLA-DRB1*03:01L HLA-DRB1*11:02L HLA-DRB4*01:01L HLA-DQA1*05:05-B1*03:116L
  source 1..16: note = Severe acute respiratory syndrome coronavirus 2
VAMKYNYEPLTQDHVD

SEQ ID NO: 21466 - protein, 15 aa, Severe acute respiratory syndrome-related coronavirus
  REGION 1..15: note = Table B: HLA-DRB1*03:01L HLA-DRB1*11:02L HLA-DRB4*02:01NL HLA-DPA1*01:03-B1*04:02L HLA-DPA1*01:03-B1*104:01L HLA-DRB1*08:02L HLA-DRB1*08:03L
  source 1..15: note = Severe acute respiratory syndrome coronavirus 2
TQEFRYMNSQGLLPP

SEQ ID NO: 21467 - protein, 17 aa, Severe acute respiratory syndrome-related coronavirus
  REGION 1..17: note = Table B: HLA-DRB1*03:01L
  source 1..17: note = Severe acute respiratory syndrome coronavirus 2
DSEVVLKKLKKSLNVAK

SEQ ID NO: 21468 - protein, 15 aa, Severe acute respiratory syndrome-related coronavirus
  REGION 1..15: note = Table B: HLA-DRB1*03:01L HLA-DRB1*11:02L HLA-DRB1*08:02L HLA-DRB1*15:01L
  source 1..15: note = Severe acute respiratory syndrome coronavirus 2
VPLNIIPLTTAAKLM

SEQ ID NO: 21469 - protein, 11 aa, Severe acute respiratory syndrome-related coronavirus
  REGION 1..11: note = Table B: HLA-DRB1*03:01L HLA-DRB4*01:01L HLA-DPA1*02:01-B1*13:01L HLA-DQA1*01:03-B1*06:01L HLA-DRB1*08:03L
  source 1..11: note = Severe acute respiratory syndrome coronavirus 2
VVDADSKIVQL

SEQ ID NO: 21470 - protein, 15 aa, Severe acute respiratory syndrome-related coronavirus
  REGION 1..15: note = Table B: HLA-DRB1*03:01L HLA-DRB1*11:02L HLA-DRB1*14:02L HLA-DRB1*09:01L HLA-DPA1*01:03-B1*04:02L HLA-DPA1*02:01-B1*13:01L HLA-DPA1*01:03-B1*02:01L HLA-DPA1*01:03-B1*104:01L HLA-DRB1*07:01L HLA-DRB1*08:02L
  REGION 1..15: note = CONT. FROM ABOVE: HLA-DRB1*08:03L HLA-DRB1*15:01L
  source 1..15: note = Severe acute respiratory syndrome coronavirus 2
WPLIVTALRANSAVK

SEQ ID NO: 21471 - protein, 14 aa, Severe acute respiratory syndrome-related coronavirus
  REGION 1..14: note = Table B: HLA-DRB1*03:01L HLA-DRB1*11:02L HLA-DRB1*13:01L HLA-DPA1*01:03-B1*04:02L
  source 1..14: note = Severe acute respiratory syndrome coronavirus 2
NSAVKLQNNELSPV

SEQ ID NO: 21472 - protein, 14 aa, Severe acute respiratory syndrome-related coronavirus
  REGION 1..14: note = Table B: HLA-DRB1*03:01L HLA-DRB1*11:02L HLA-DPA1*01:03-B1*04:02L
  source 1..14: note = Severe acute respiratory syndrome coronavirus 2
SAVKLQNNELSPVA

SEQ ID NO: 21473 - protein, 17 aa, Severe acute respiratory syndrome-related coronavirus
  REGION 1..17: note = Table B: HLA-DRB1*03:01L
  source 1..17: note = Severe acute respiratory syndrome coronavirus 2
EPPCRFVTDTPKGPKVK

SEQ ID NO: 21474 - protein, 17 aa, Severe acute respiratory syndrome-related coronavirus
  REGION 1..17: note = Table B: HLA-DRB1*03:01L
  source 1..17: note = Severe acute respiratory syndrome coronavirus 2
GPKVKYLYFIKGLNNLN

SEQ ID NO: 21475 - protein, 16 aa, Severe acute respiratory syndrome-related coronavirus
  REGION 1..16: note = Table B: HLA-DRB1*03:01L
  source 1..16: note = Severe acute respiratory syndrome coronavirus 2
VKYLYFIKGLNNLNRG

SEQ ID NO: 21476 - protein, 13 aa, Severe acute respiratory syndrome-related coronavirus
  REGION 1..13: note = Table B: HLA-DRB1*03:01L HLA-DRB1*11:01L HLA-DRB4*01:01L HLA-DRB3*01:01L HLA-DPA1*01:03-B1*02:01L HLA-DRB1*08:03L
  source 1..13: note = Severe acute respiratory syndrome coronavirus 2
RGMVLGSLAATVR

SEQ ID NO: 21477 - protein, 15 aa, Severe acute respiratory syndrome-related coronavirus
  REGION 1..15: note = Table B: HLA-DRB1*03:01L HLA-DPA1*01:02-B1*04:01L
  source 1..15: note = Severe acute respiratory syndrome coronavirus 2
LGSLAATVRLQAGNA

SEQ ID NO: 21478 - protein, 15 aa, Severe acute respiratory syndrome-related coronavirus
  REGION 1..15: note = Table B: HLA-DRB1*03:01L HLA-DRB1*13:01L HLA-DPA1*01:03-B1*04:01L HLA-DRB1*08:02L HLA-DRB1*15:01L
  source 1..15: note = Severe acute respiratory syndrome coronavirus 2
TGQAITVTPEANMDQ

SEQ ID NO: 21479 - protein, 15 aa, Severe acute respiratory syndrome-related coronavirus
  REGION 1..15: note = Table B: HLA-DRB1*03:01L HLA-DRB1*11:02L
  source 1..15: note = Severe acute respiratory syndrome coronavirus 2
REPMLQSADAQSFLN

SEQ ID NO: 21480 - protein, 15 aa, Severe acute respiratory syndrome-related coronavirus
  REGION 1..15: note = Table B: HLA-DRB1*03:01L
  source 1..15: note = Severe acute respiratory syndrome coronavirus 2
EPMLQSADAQSFLNR

SEQ ID NO: 21481 - protein, 17 aa, Severe acute respiratory syndrome-related coronavirus
  REGION 1..17: note = Table B: HLA-DRB1*03:01L
  source 1..17: note = Severe acute respiratory syndrome coronavirus 2
DDNLIDSYFVVKRHTFS

SEQ ID NO: 21482 - protein, 14 aa, Severe acute respiratory syndrome-related coronavirus
  REGION 1..14: note = Table B: HLA-DRB1*03:01L HLA-DQA1*05:05-B1*03:19L HLA-DRB1*13:01L HLA-DPA1*01:03-B1*104:01L HLA-DQA1*05:05-B1*03:01L HLA-DRB1*07:01L
  source 1..14: note = Severe acute respiratory syndrome coronavirus 2
IDSYFVVKRHTFSN

SEQ ID NO: 21483 - protein, 16 aa, Severe acute respiratory syndrome-related coronavirus
  REGION 1..16: note = Table B: HLA-DRB1*03:01L HLA-DRB4*01:01L HLA-DPA1*01:03-B1*04:01L
  source 1..16: note = Severe acute respiratory syndrome coronavirus 2
GYHFRELGVVHNQDVN

SEQ ID NO: 21484 - protein, 11 aa, Severe acute respiratory syndrome-related coronavirus
  REGION 1..11: note = Table B: HLA-DRB1*03:01L HLA-DPA1*02:01-B1*13:01L
  source 1..11: note = Severe acute respiratory syndrome coronavirus 2
VYAADPAMHAA

SEQ ID NO: 21485 - protein, 13 aa, Severe acute respiratory syndrome-related coronavirus
  REGION 1..13: note = Table B: HLA-DRB1*03:01L
  source 1..13: note = Severe acute respiratory syndrome coronavirus 2
ADPAMHAASGNLL

SEQ ID NO: 21486 - protein, 12 aa, Severe acute respiratory syndrome-related coronavirus
  REGION 1..12: note = Table B: HLA-DRB1*03:01L HLA-DRB3*01:01L HLA-DRB1*16:01L
  source 1..12: note = Severe acute respiratory syndrome coronavirus 2
GNLLLDKRTTCF

SEQ ID NO: 21487 - protein, 16 aa, Severe acute respiratory syndrome-related coronavirus
  REGION 1..16: note = Table B: HLA-DRB1*03:01L
  source 1..16: note = Severe acute respiratory syndrome coronavirus 2
VSKGFFKEGSSVELKH

SEQ ID NO: 21488 - protein, 12 aa, Severe acute respiratory syndrome-related coronavirus
  REGION 1..12: note = Table B: HLA-DRB1*03:01L HLA-DRB1*08:01L HLA-DPA1*01:03-B1*04:01L HLA-DRB1*04:10L HLA-DRB3*01:01L HLA-DPA1*02:01-B1*13:01L HLA-DRB1*10:01L HLA-DRB1*08:03L
  source 1..12: note = Severe acute respiratory syndrome coronavirus 2
NNLDKSAGFPFN

SEQ ID NO: 21489 - protein, 16 aa, Severe acute respiratory syndrome-related coronavirus
  REGION 1..16: note = Table B: HLA-DRB1*03:01L HLA-DRB4*01:01L HLA-DRB1*09:01L HLA-DPA1*01:03-B1*02:01L HLA-DRB1*07:01L
  source 1..16: note = Severe acute respiratory syndrome coronavirus 2
GKARLYYDSMSYEDQD

SEQ ID NO: 21490 - protein, 15 aa, Severe acute respiratory syndrome-related coronavirus
  REGION 1..15: note = Table B: HLA-DRB1*03:01L HLA-DRB1*11:03L HLA-DRB1*14:54L HLA-DRB1*08:03L
  source 1..15: note = Severe acute respiratory syndrome coronavirus 2
TKRNVIPTITQMNLK

SEQ ID NO: 21491 - protein, 14 aa, Severe acute respiratory syndrome-related coronavirus
  REGION 1..14: note = Table B: HLA-DRB1*03:01L HLA-DRB1*11:02L HLA-DRB1*13:01L HLA-DRB1*08:02L HLA-DRB1*08:03L
  source 1..14: note = Severe acute respiratory syndrome coronavirus 2
YAISAKNRARTVAG

SEQ ID NO: 21492 - protein, 15 aa, Severe acute respiratory syndrome-related coronavirus
  REGION 1..15: note = Table B: HLA-DRB1*03:01L HLA-DRB1*14:02L HLA-DPA1*01:03-B1*104:01L HLA-DPA1*01:02-B1*04:01L
  source 1..15: note = Severe acute respiratory syndrome coronavirus 2
HQKLLKSIAATRGAT

SEQ ID NO: 21493 - protein, 15 aa, Severe acute respiratory syndrome-related coronavirus
  REGION 1..15: note = Table B: HLA-DRB1*03:01L HLA-DRB1*11:02L HLA-DPA1*01:03-B1*04:02L HLA-DRB1*08:02L HLA-DRB1*08:03L
  source 1..15: note = Severe acute respiratory syndrome coronavirus 2
LKSIAATRGATVVIG

SEQ ID NO: 21494 - protein, 16 aa, Severe acute respiratory syndrome-related coronavirus
  REGION 1..16: note = Table B: HLA-DRB1*03:01L
  source 1..16: note = Severe acute respiratory syndrome coronavirus 2
DDYVYLPYPDPSRILG

SEQ ID NO: 21495 - protein, 17 aa, Severe acute respiratory syndrome-related coronavirus
  REGION 1..17: note = Table B: HLA-DRB1*03:01L
  source 1..17: note = Severe acute respiratory syndrome coronavirus 2
TSRYWEPEFYEAMYTPH

SEQ ID NO: 21496 - protein, 16 aa, Severe acute respiratory syndrome-related coronavirus
  REGION 1..16: note = Table B: HLA-DRB1*03:01L HLA-DRB1*15:01L
  source 1..16: note = Severe acute respiratory syndrome coronavirus 2
EPEFYEAMYTPHTVLQ

SEQ ID NO: 21497 - protein, 16 aa, Severe acute respiratory syndrome-related coronavirus
  REGION 1..16: note = Table B: HLA-DRB1*03:01L
  source 1..16: note = Severe acute respiratory syndrome coronavirus 2
ERLKLFAAETLKATEE

SEQ ID NO: 21498 - protein, 15 aa, Severe acute respiratory syndrome-related coronavirus
  REGION 1..15: note = Table B: HLA-DRB1*03:01L HLA-DRB1*11:02L
  source 1..15: note = Severe acute respiratory syndrome coronavirus 2
LKLFAAETLKATEET

SEQ ID NO: 21499 - protein, 13 aa, Severe acute respiratory syndrome-related coronavirus
  REGION 1..13: note = Table B: HLA-DRB1*03:01L HLA-DRB1*14:02L
  source 1..13: note = Severe acute respiratory syndrome coronavirus 2
GYRVTKNSKVQIG

SEQ ID NO: 21500 - protein, 15 aa, Severe acute respiratory syndrome-related coronavirus
  REGION 1..15: note = Table B: HLA-DRB1*03:01L HLA-DRB1*11:03L
  source 1..15: note = Severe acute respiratory syndrome coronavirus 2
RARVECFDKFKVNST

SEQ ID NO: 21501 - protein, 13 aa, Severe acute respiratory syndrome-related coronavirus
  REGION 1..13: note = Table B: HLA-DRB1*03:01L HLA-DRB1*11:02L HLA-DRB1*11:04L HLA-DRB1*08:01L HLA-DPA1*01:03-B1*04:01L HLA-DRB3*01:01L HLA-DRB1*07:01L
  source 1..13: note = Severe acute respiratory syndrome coronavirus 2
DIVVFDEISMATN

SEQ ID NO: 21502 - protein, 11 aa, Severe acute respiratory syndrome-related coronavirus
  REGION 1..11: note = Table B: HLA-DRB1*03:01L HLA-DRB1*11:03L
  source 1..11: note = Severe acute respiratory syndrome coronavirus 2
LVYDNKLKAHK

SEQ ID NO: 21503 - protein, 14 aa, Severe acute respiratory syndrome-related coronavirus
  REGION 1..14: note = Table B: HLA-DRB1*03:01L
  source 1..14: note = Severe acute respiratory syndrome coronavirus 2
EFLTRNPAWRKAVF

SEQ ID NO: 21504 - protein, 13 aa, Severe acute respiratory syndrome-related coronavirus
  REGION 1..13: note = Table B: HLA-DRB1*03:01L HLA-DQA1*01:01-B1*05:01L HLA-DRB4*02:01NL HLA-DRB1*13:01L HLA-DRB4*01:01L HLA-DPA1*01:03-B1*04:01L HLA-DPA1*01:03-B1*04:02L HLA-DRB3*01:01L HLA-DPA1*02:01-B1*13:01L
  REGION 1..13: note = CONT. FROM ABOVE: HLA-DPA1*01:03-B1*02:01L HLA-DPA1*01:03-B1*104 :01L HLA-DPA1*01:02-B1*04:01L HLA-DRB1*08:02L
  source 1..13: note = Severe acute respiratory syndrome coronavirus 2
ISPYNSQNAVASK

SEQ ID NO: 21505 - protein, 14 aa, Severe acute respiratory syndrome-related coronavirus
  REGION 1..14: note = Table B: HLA-DRB1*03:01L HLA-DRB1*11:02L HLA-DQA1*01:01-B1*05:01L HLA-DRB5*01:01L HLA-DRB1*13:01L HLA-DPA1*01:03-B1*04:01L HLA-DPA1*01:03-B1*04:02L HLA-DPA1*01:03-B1*02:01L HLA-DRB1*08:02L
  source 1..14: note = Severe acute respiratory syndrome coronavirus 2
ASKILGLPTQTVDS

SEQ ID NO: 21506 - protein, 16 aa, Severe acute respiratory syndrome-related coronavirus
  REGION 1..16: note = Table B: HLA-DRB1*03:01L HLA-DRB1*08:02L HLA-DRB1*15:01L
  source 1..16: note = Severe acute respiratory syndrome coronavirus 2
DKLQFTSLEIPRRNVA

SEQ ID NO: 21507 - protein, 16 aa, Severe acute respiratory syndrome-related coronavirus
  REGION 1..16: note = Table B: HLA-DRB1*03:01L HLA-DPA1*01:03-B1*04:02L HLA-DRB1*08:02L HLA-DRB1*15:01L
  source 1..16: note = Severe acute respiratory syndrome coronavirus 2
IPRRNVATLQAENVTG

SEQ ID NO: 21508 - protein, 11 aa, Severe acute respiratory syndrome-related coronavirus
  REGION 1..11: note = Table B: HLA-DRB1*03:01L HLA-DRB1*14:02L HLA-DPA1*01:03-B1*04:01L HLA-DQA1*02:01-B1*03:03L
  source 1..11: note = Severe acute respiratory syndrome coronavirus 2
DIPGIPKDMTY

SEQ ID NO: 21509 - protein, 15 aa, Severe acute respiratory syndrome-related coronavirus
  REGION 1..15: note = Table B: HLA-DRB1*03:01L
  source 1..15: note = Severe acute respiratory syndrome coronavirus 2
GFDYVYNPFMIDVQQ

SEQ ID NO: 21510 - protein, 15 aa, Severe acute respiratory syndrome-related coronavirus
  REGION 1..15: note = Table B: HLA-DRB1*03:01L HLA-DRB1*13:01L
  source 1..15: note = Severe acute respiratory syndrome coronavirus 2
YNLWNTFTRLQSLEN

SEQ ID NO: 21511 - protein, 14 aa, Severe acute respiratory syndrome-related coronavirus
  REGION 1..14: note = Table B: HLA-DRB1*03:01L
  source 1..14: note = Severe acute respiratory syndrome coronavirus 2
WNTFTRLQSLENVA

SEQ ID NO: 21512 - protein, 15 aa, Severe acute respiratory syndrome-related coronavirus
  REGION 1..15: note = Table B: HLA-DRB1*03:01L HLA-DRB1*11:02L HLA-DQA1*01:01-B1*05:01L HLA-DRB1*13:01L HLA-DQA1*05:05-B1*03:116L HLA-DRB1*08:02L
  source 1..15: note = Severe acute respiratory syndrome coronavirus 2
LQSLENVAFNVVNKG

SEQ ID NO: 21513 - protein, 13 aa, Severe acute respiratory syndrome-related coronavirus
  REGION 1..13: note = Table B: HLA-DRB1*03:01L HLA-DRB1*11:02L HLA-DQA1*05:05-B1*03:116L HLA-DPA1*01:03-B1*02:01L HLA-DRB1*15:01L
  source 1..13: note = Severe acute respiratory syndrome coronavirus 2
NTVYTKVDGVDVE

SEQ ID NO: 21514 - protein, 19 aa, Severe acute respiratory syndrome-related coronavirus
  REGION 1..19: note = Table B: HLA-DRB1*03:01L HLA-DQA1*05:05-B1*03:19L HLA-DQA1*05:05-B1*03:116L
  source 1..19: note = Severe acute respiratory syndrome coronavirus 2
LPVNVAFELWAKRNIKPVP

SEQ ID NO: 21515 - protein, 11 aa, Severe acute respiratory syndrome-related coronavirus
  REGION 1..11: note = Table B: HLA-DRB1*03:01L HLA-DRB1*11:02L HLA-DQA1*01-B1*05L HLA-DRB1*15:03L
  source 1..11: note = Severe acute respiratory syndrome coronavirus 2
DIAANTVIWDY

SEQ ID NO: 21516 - protein, 14 aa, Severe acute respiratory syndrome-related coronavirus
  REGION 1..14: note = Table B: HLA-DRB1*03:01L HLA-DPA1*01:03-B1*104:01L HLA-DRB1*08:02L
  source 1..14: note = Severe acute respiratory syndrome coronavirus 2
NGVLITEGSVKGLQ

SEQ ID NO: 21517 - protein, 16 aa, Severe acute respiratory syndrome-related coronavirus
  REGION 1..16: note = Table B: HLA-DRB1*03:01L HLA-DRB1*13:01L HLA-DPA1*01:03-B1*104:01L HLA-DRB1*10:01L HLA-DQA1*01:03-B1*06:01L
  source 1..16: note = Severe acute respiratory syndrome coronavirus 2
VKTQFNYYKKVDGVVQ

SEQ ID NO: 21518 - protein, 16 aa, Severe acute respiratory syndrome-related coronavirus
  REGION 1..16: note = Table B: HLA-DRB1*03:01L
  source 1..16: note = Severe acute respiratory syndrome coronavirus 2
IDLLLDDFVEIIKSQD

SEQ ID NO: 21519 - protein, 13 aa, Severe acute respiratory syndrome-related coronavirus
  REGION 1..13: note = Table B: HLA-DRB1*03:01L HLA-DRB1*11:02L HLA-DQA1*01:01-B1*05:01L HLA-DRB1*13:01L HLA-DPA1*01:03-B1*04:01L HLA-DPA1*01:03-B1*04:02L HLA-DRB3*01:01L HLA-DPA1*01:03-B1*02:01L HLA-DRB1*08:02L
  REGION 1..13: note = CONT. FROM ABOVE: HLA-DRB1*15:01L
  source 1..13: note = Severe acute respiratory syndrome coronavirus 2
VEIIKSQDLSVVS

SEQ ID NO: 21520 - protein, 12 aa, Severe acute respiratory syndrome-related coronavirus
  REGION 1..12: note = Table B: HLA-DRB1*03:01L HLA-DRB1*11:02L
  source 1..12: note = Severe acute respiratory syndrome coronavirus 2
IFWRNTNPIQLS

SEQ ID NO: 21521 - protein, 16 aa, Severe acute respiratory syndrome-related coronavirus
  REGION 1..16: note = Table B: HLA-DRB1*03:01L HLA-DRB1*13:01L
  source 1..16: note = Severe acute respiratory syndrome coronavirus 2
LSLLSKGRLIIRENNR

SEQ ID NO: 21522 - protein, 13 aa, Severe acute respiratory syndrome-related coronavirus
  REGION 1..13: note = Table B: HLA-DRB1*03:01L HLA-DRB1*11:02L HLA-DRB1*13:01L HLA-DPA1*01:03-B1*02:01L HLA-DRB1*08:02L
  source 1..13: note = Severe acute respiratory syndrome coronavirus 2
NRVVISSDVLVNN

SEQ ID NO: 21523 - protein, 14 aa, Severe acute respiratory syndrome-related coronavirus
  REGION 1..14: note = Table B: HLA-DRB1*03:01L HLA-DRB1*07:01L
  source 1..14: note = Severe acute respiratory syndrome coronavirus 2
FHAIHVSGTNGTKR

SEQ ID NO: 21524 - protein, 14 aa, Severe acute respiratory syndrome-related coronavirus
  REGION 1..14: note = Table B: HLA-DRB1*03:01L HLA-DRB1*07:01L
  source 1..14: note = Severe acute respiratory syndrome coronavirus 2
VYFASTEKSNIIRG

SEQ ID NO: 21525 - protein, 16 aa, Severe acute respiratory syndrome-related coronavirus
  REGION 1..16: note = Table B: HLA-DRB1*03:01L HLA-DRB1*11:02L HLA-DQA1*05:05-B1*03:116L
  source 1..16: note = Severe acute respiratory syndrome coronavirus 2
IIRGWIFGTTLDSKTQ

SEQ ID NO: 21526 - protein, 13 aa, Severe acute respiratory syndrome-related coronavirus
  REGION 1..13: note = Table B: HLA-DRB1*03:01L HLA-DRB1*11:02L HLA-DRB1*11:01L HLA-DRB4*01:01L HLA-DRB1*09:01L HLA-DRB3*01:01L HLA-DRB1*07:01L HLA-DRB1*08:03L
  source 1..13: note = Severe acute respiratory syndrome coronavirus 2
SLLIVNNATNVVI

SEQ ID NO: 21527 - protein, 15 aa, Severe acute respiratory syndrome-related coronavirus
  REGION 1..15: note = Table B: HLA-DRB1*03:01L HLA-DRB1*11:02L
  source 1..15: note = Severe acute respiratory syndrome coronavirus 2
GVYYHKNNKSWMESE

SEQ ID NO: 21528 - protein, 16 aa, Severe acute respiratory syndrome-related coronavirus
  REGION 1..16: note = Table B: HLA-DRB1*03:01L HLA-DQA1*05:05-B1*03:116L HLA-DRB1*08:02L
  source 1..16: note = Severe acute respiratory syndrome coronavirus 2
ESEFRVYSSANNCTFE

SEQ ID NO: 21529 - protein, 13 aa, Severe acute respiratory syndrome-related coronavirus
  REGION 1..13: note = Table B: HLA-DRB1*03:01L
  source 1..13: note = Severe acute respiratory syndrome coronavirus 2
NITRFQTLLALHR

SEQ ID NO: 21530 - protein, 15 aa, Severe acute respiratory syndrome-related coronavirus
  REGION 1..15: note = Table B: HLA-DRB1*03:01L HLA-DRB1*11:02L HLA-DRB3*01:01L
  source 1..15: note = Severe acute respiratory syndrome coronavirus 2
TFLLKYNENGTITDA

SEQ ID NO: 21531 - protein, 14 aa, Severe acute respiratory syndrome-related coronavirus
  REGION 1..14: note = Table B: HLA-DRB1*03:01L HLA-DRB1*11:02L HLA-DRB1*08:02L
  source 1..14: note = Severe acute respiratory syndrome coronavirus 2
VIAWNSNNLDSKVG

SEQ ID NO: 21532 - protein, 15 aa, Severe acute respiratory syndrome-related coronavirus
  REGION 1..15: note = Table B: HLA-DRB1*03:01L HLA-DQA1*05:05-B1*03:116L
  source 1..15: note = Severe acute respiratory syndrome coronavirus 2
ISTEIYQAGSTPCNG

SEQ ID NO: 21533 - protein, 16 aa, Severe acute respiratory syndrome-related coronavirus
  REGION 1..16: note = Table B: HLA-DRB1*03:01L HLA-DRB1*11:02L HLA-DRB4*01:01L HLA-DPA1*01:03-B1*04:01L HLA-DRB1*04:10L HLA-DRB1*09:01L HLA-DRB1*07:01L
  source 1..16: note = Severe acute respiratory syndrome coronavirus 2
LPFQQFGRDIADTTDA

SEQ ID NO: 21534 - protein, 15 aa, Severe acute respiratory syndrome-related coronavirus
  REGION 1..15: note = Table B: HLA-DRB1*03:01L HLA-DRB1*11:02L
  source 1..15: note = Severe acute respiratory syndrome coronavirus 2
LQDVVNQNAQALNTL

SEQ ID NO: 21535 - protein, 15 aa, Severe acute respiratory syndrome-related coronavirus
  REGION 1..15: note = Table B: HLA-DRB1*03:01L HLA-DRB1*11:02L HLA-DQA1*01:01-B1*05:01L HLA-DPA1*01:03-B1*02:01L HLA-DRB1*08:02L HLA-DRB1*15:01L
  source 1..15: note = Severe acute respiratory syndrome coronavirus 2
NTLVKQLSSNFGAIS

SEQ ID NO: 21536 - protein, 16 aa, Severe acute respiratory syndrome-related coronavirus
  REGION 1..16: note = Table B: HLA-DRB1*03:01L HLA-DRB1*13:01L HLA-DRB4*01:01L HLA-DQA1*05:05-B1*03:116L
  source 1..16: note = Severe acute respiratory syndrome coronavirus 2
VTQQLIRAAEIRASAN

SEQ ID NO: 21537 - protein, 19 aa, Severe acute respiratory syndrome-related coronavirus
  REGION 1..19: note = Table B: HLA-DRB1*03:01L
  source 1..19: note = Severe acute respiratory syndrome coronavirus 2
APHGVVFLHVTYVPAQEKN

SEQ ID NO: 21538 - protein, 12 aa, Severe acute respiratory syndrome-related coronavirus
  REGION 1..12: note = Table B: HLA-DRB1*03:01L HLA-DRB1*14:01L HLA-DRB3*01:01L
  source 1..12: note = Severe acute respiratory syndrome coronavirus 2
AICHDGKAHFPR

SEQ ID NO: 21539 - protein, 13 aa, Severe acute respiratory syndrome-related coronavirus
  REGION 1..13: note = Table B: HLA-DRB1*03:01L
  source 1..13: note = Severe acute respiratory syndrome coronavirus 2
CKFDEDDSEPVLK

SEQ ID NO: 21540 - protein, 11 aa, Severe acute respiratory syndrome-related coronavirus
  REGION 1..11: note = Table B: HLA-DRB1*03:01L
  source 1..11: note = Severe acute respiratory syndrome coronavirus 2
EPVLKGVKLHY

SEQ ID NO: 21541 - protein, 16 aa, Severe acute respiratory syndrome-related coronavirus
  REGION 1..16: note = Table B: HLA-DRB1*03:01L
  source 1..16: note = Severe acute respiratory syndrome coronavirus 2
TSDYYQLYSTQLSTDT

SEQ ID NO: 21542 - protein, 16 aa, Severe acute respiratory syndrome-related coronavirus
  REGION 1..16: note = Table B: HLA-DRB1*03:01L
  source 1..16: note = Severe acute respiratory syndrome coronavirus 2
SDYYQLYSTQLSTDTG

SEQ ID NO: 21543 - protein, 13 aa, Severe acute respiratory syndrome-related coronavirus
  REGION 1..13: note = Table B: HLA-DRB1*03:01L
  source 1..13: note = Severe acute respiratory syndrome coronavirus 2
YNKIVDEPEEHVQ

SEQ ID NO: 21544 - protein, 14 aa, Severe acute respiratory syndrome-related coronavirus
  REGION 1..14: note = Table B: HLA-DRB1*03:01L HLA-DRB1*11:02L
  source 1..14: note = Severe acute respiratory syndrome coronavirus 2
TNILLNVPLHGTIL

SEQ ID NO: 21545 - protein, 14 aa, Severe acute respiratory syndrome-related coronavirus
  REGION 1..14: note = Table B: HLA-DRB1*03:01L HLA-DRB1*11:02L HLA-DRB4*02:01NL HLA-DRB1*13:01L HLA-DPA1*01:03-B1*04:01L HLA-DPA1*01:03-B1*04:02L HLA-DPA1*01:03-B1*02:01L HLA-DPA1*01:03-B1*104:01L HLA-DRB1*08:02L HLA-DRB1*15:01L
  source 1..14: note = Severe acute respiratory syndrome coronavirus 2
LSYYKLGASQRVAG

SEQ ID NO: 21546 - protein, 16 aa, Severe acute respiratory syndrome-related coronavirus
  REGION 1..16: note = Table B: HLA-DRB1*03:01L HLA-DQA1*05:05-B1*03:116L
  source 1..16: note = Severe acute respiratory syndrome coronavirus 2
SYYKLGASQRVAGDSG

SEQ ID NO: 21547 - protein, 17 aa, Severe acute respiratory syndrome-related coronavirus
  REGION 1..17: note = Table B: HLA-DRB1*03:01L HLA-DRB1*14:02L
  source 1..17: note = Severe acute respiratory syndrome coronavirus 2
APLIELCVDEAGSKSPI

SEQ ID NO: 21548 - protein, 16 aa, Severe acute respiratory syndrome-related coronavirus
  REGION 1..16: note = Table B: HLA-DRB1*03:01L
  source 1..16: note = Severe acute respiratory syndrome coronavirus 2
FTALTQHGKEDLKFPR

SEQ ID NO: 21549 - protein, 15 aa, Severe acute respiratory syndrome-related coronavirus
  REGION 1..15: note = Table B: HLA-DRB1*03:01L HLA-DRB1*11:02L HLA-DQA1*01:01-B1*05:01L HLA-DQA1*01-B1*05L HLA-DQA1*05:01-B1*02:01L HLA-DRB1*13:01L HLA-DRB1*09:01L HLA-DPA1*01:03-B1*04:02L HLA-DRB1*12:02L HLA-DRB3*01:01L
  REGION 1..15: note = CONT. FROM ABOVE: HLA-DPA1*01:03-B1*02:01L HLA-DPA1*01:03-B1*104 :01L HLA-DPA1*01:02-B1*04:01L HLA-DRB1*07:01L HLA-DRB1*08:02L HL A-DRB1*15:01L
  source 1..15: note = Severe acute respiratory syndrome coronavirus 2
LPKGFYAEGSRGGSQ

SEQ ID NO: 21550 - protein, 16 aa, Severe acute respiratory syndrome-related coronavirus
  REGION 1..16: note = Table B: HLA-DRB1*03:01L HLA-DRB1*14:01L HLA-DRB1*11:04L HLA-DRB3*01:01L
  source 1..16: note = Severe acute respiratory syndrome coronavirus 2
KPRQKRTATKAYNVTQ

SEQ ID NO: 21551 - protein, 16 aa, Severe acute respiratory syndrome-related coronavirus
  REGION 1..16: note = Table B: HLA-DRB1*03:01L
  source 1..16: note = Severe acute respiratory syndrome coronavirus 2
TQGNFGDQELIRQGTD

SEQ ID NO: 21552 - protein, 13 aa, Severe acute respiratory syndrome-related coronavirus
  REGION 1..13: note = Table B: HLA-DRB1*14:01L
  source 1..13: note = Severe acute respiratory syndrome coronavirus 2
VGEIPVAYRKVLL

SEQ ID NO: 21553 - protein, 13 aa, Severe acute respiratory syndrome-related coronavirus
  REGION 1..13: note = Table B: HLA-DRB1*14:01L
  source 1..13: note = Severe acute respiratory syndrome coronavirus 2
GEIPVAYRKVLLR

SEQ ID NO: 21554 - protein, 13 aa, Severe acute respiratory syndrome-related coronavirus
  REGION 1..13: note = Table B: HLA-DRB1*14:01L HLA-DRB1*08:01L HLA-DRB1*12:01L HLA-DRB3*01:01L HLA-DRB1*15:03L
  source 1..13: note = Severe acute respiratory syndrome coronavirus 2
EIPVAYRKVLLRK

SEQ ID NO: 21555 - protein, 15 aa, Severe acute respiratory syndrome-related coronavirus
  REGION 1..15: note = Table B: HLA-DRB1*14:01L HLA-DRB1*11:04L HLA-DRB1*11:01L HLA-DRB3*01:01L HLA-DRB1*15:03L
  source 1..15: note = Severe acute respiratory syndrome coronavirus 2
RKVLLRKNGNKGAGG

SEQ ID NO: 21556 - protein, 16 aa, Severe acute respiratory syndrome-related coronavirus
  REGION 1..16: note = Table B: HLA-DRB1*14:01L HLA-DRB1*15:03L
  source 1..16: note = Severe acute respiratory syndrome coronavirus 2
IKDLLARAGKASCTLS

SEQ ID NO: 21557 - protein, 14 aa, Severe acute respiratory syndrome-related coronavirus
  REGION 1..14: note = Table B: HLA-DRB1*14:01L HLA-DRB3*01:01L HLA-DRB1*04:08L HLA-DRB1*15:03L
  source 1..14: note = Severe acute respiratory syndrome coronavirus 2
KTIQPRVEKKKLDG

SEQ ID NO: 21558 - protein, 14 aa, Severe acute respiratory syndrome-related coronavirus
  REGION 1..14: note = Table B: HLA-DRB1*14:01L HLA-DRB1*08:01L HLA-DRB1*12:01L HLA-DRB1*16:01L HLA-DRB1*04:08L HLA-DQA1*02:01-B1*03:03L HLA-DRB1*15:03L
  source 1..14: note = Severe acute respiratory syndrome coronavirus 2
TILRKGGRTIAFGG

SEQ ID NO: 21559 - protein, 11 aa, Severe acute respiratory syndrome-related coronavirus
  REGION 1..11: note = Table B: HLA-DRB1*14:01L
  source 1..11: note = Severe acute respiratory syndrome coronavirus 2
NIGCNHTGVVG

SEQ ID NO: 21560 - protein, 10 aa, Severe acute respiratory syndrome-related coronavirus
  REGION 1..10: note = Table B: HLA-DRB1*14:01L HLA-DPA1*01:02-B1*04:01L
  source 1..10: note = Severe acute respiratory syndrome coronavirus 2
LEILQKEKVN

SEQ ID NO: 21561 - protein, 10 aa, Severe acute respiratory syndrome-related coronavirus
  REGION 1..10: note = Table B: HLA-DRB1*14:01L
  source 1..10: note = Severe acute respiratory syndrome coronavirus 2
ILQKEKVNIN

SEQ ID NO: 21562 - protein, 12 aa, Severe acute respiratory syndrome-related coronavirus
  REGION 1..12: note = Table B: HLA-DRB1*14:01L HLA-DRB1*12:01L HLA-DRB1*16:01L
  source 1..12: note = Severe acute respiratory syndrome coronavirus 2
KVNINIVGDFKL

SEQ ID NO: 21563 - protein, 11 aa, Severe acute respiratory syndrome-related coronavirus
  REGION 1..11: note = Table B: HLA-DRB1*14:01L
  source 1..11: note = Severe acute respiratory syndrome coronavirus 2
INIVGDFKLNE

SEQ ID NO: 21564 - protein, 12 aa, Severe acute respiratory syndrome-related coronavirus
  REGION 1..12: note = Table B: HLA-DRB1*14:01L HLA-DRB1*04:08L
  source 1..12: note = Severe acute respiratory syndrome coronavirus 2
ARVVRSIFSRTL

SEQ ID NO: 21565 - protein, 12 aa, Severe acute respiratory syndrome-related coronavirus
  REGION 1..12: note = Table B: HLA-DRB1*14:01L
  source 1..12: note = Severe acute respiratory syndrome coronavirus 2
QNSVRVLQKAAI

SEQ ID NO: 21566 - protein, 13 aa, Severe acute respiratory syndrome-related coronavirus
  REGION 1..13: note = Table B: HLA-DRB1*14:01L HLA-DRB1*14:17L HLA-DRB1*16:01L
  source 1..13: note = Severe acute respiratory syndrome coronavirus 2
TGGVVQLTSQWLT

SEQ ID NO: 21567 - protein, 11 aa, Severe acute respiratory syndrome-related coronavirus
  REGION 1..11: note = Table B: HLA-DRB1*14:01L HLA-DRB1*08:01L
  source 1..11: note = Severe acute respiratory syndrome coronavirus 2
GQIVTCAKEIK

SEQ ID NO: 21568 - protein, 14 aa, Severe acute respiratory syndrome-related coronavirus
  REGION 1..14: note = Table B: HLA-DRB1*14:01L HLA-DRB1*08:01L HLA-DRB1*11:01L
  source 1..14: note = Severe acute respiratory syndrome coronavirus 2
VEAPLVGTPVCING

SEQ ID NO: 21569 - protein, 15 aa, Severe acute respiratory syndrome-related coronavirus
  REGION 1..15: note = Table B: HLA-DRB1*14:01L
  source 1..15: note = Severe acute respiratory syndrome coronavirus 2
LDERIDKVLNEKCSA

SEQ ID NO: 21570 - protein, 12 aa, Severe acute respiratory syndrome-related coronavirus
  REGION 1..12: note = Table B: HLA-DRB1*14:01L HLA-DRB1*14:54L
  source 1..12: note = Severe acute respiratory syndrome coronavirus 2
ADIVEEAKKVKP

SEQ ID NO: 21571 - protein, 13 aa, Severe acute respiratory syndrome-related coronavirus
  REGION 1..13: note = Table B: HLA-DRB1*14:01L HLA-DRB1*08:01L HLA-DPA1*03:01-B1*105:01L
  source 1..13: note = Severe acute respiratory syndrome coronavirus 2
VNAANVYLKHGGG

SEQ ID NO: 21572 - protein, 11 aa, Severe acute respiratory syndrome-related coronavirus
  REGION 1..11: note = Table B: HLA-DRB1*14:01L HLA-DRB1*14:02L HLA-DPA1*01:03-B1*04:01L HLA-DRB1*09:01L HLA-DPA1*01:03-B1*04:02L HLA-DRB1*12:01L HLA-DRB1*10:01L HLA-DRB1*08:03L
  source 1..11: note = Severe acute respiratory syndrome coronavirus 2
SAYENFNQHEV

SEQ ID NO: 21573 - protein, 12 aa, Severe acute respiratory syndrome-related coronavirus
  REGION 1..12: note = Table B: HLA-DRB1*14:01L
  source 1..12: note = Severe acute respiratory syndrome coronavirus 2
VKPFITESKPSV

SEQ ID NO: 21574 - protein, 15 aa, Severe acute respiratory syndrome-related coronavirus
  REGION 1..15: note = Table B: HLA-DRB1*14:01L
  source 1..15: note = Severe acute respiratory syndrome coronavirus 2
HPDSATLVSDIDITF

SEQ ID NO: 21575 - protein, 13 aa, Severe acute respiratory syndrome-related coronavirus
  REGION 1..13: note = Table B: HLA-DRB1*14:01L
  source 1..13: note = Severe acute respiratory syndrome coronavirus 2
IVGDVVQEGVLTA

SEQ ID NO: 21576 - protein, 12 aa, Severe acute respiratory syndrome-related coronavirus
  REGION 1..12: note = Table B: HLA-DRB1*14:01L HLA-DRB1*14:54L
  source 1..12: note = Severe acute respiratory syndrome coronavirus 2
TAVVIPTKKAGG

SEQ ID NO: 21577 - protein, 14 aa, Severe acute respiratory syndrome-related coronavirus
  REGION 1..14: note = Table B: HLA-DRB1*14:01L HLA-DRB1*16:01L HLA-DRB1*15:03L
  source 1..14: note = Severe acute respiratory syndrome coronavirus 2
GTTEMLAKALRKVP

SEQ ID NO: 21578 - protein, 11 aa, Severe acute respiratory syndrome-related coronavirus
  REGION 1..11: note = Table B: HLA-DRB1*14:01L
  source 1..11: note = Severe acute respiratory syndrome coronavirus 2
PSIISNEKQEI

SEQ ID NO: 21579 - protein, 11 aa, Severe acute respiratory syndrome-related coronavirus
  REGION 1..11: note = Table B: HLA-DRB1*14:01L
  source 1..11: note = Severe acute respiratory syndrome coronavirus 2
GTVSWNLREML

SEQ ID NO: 21580 - protein, 12 aa, Severe acute respiratory syndrome-related coronavirus
  REGION 1..12: note = Table B: HLA-DRB1*14:01L
  source 1..12: note = Severe acute respiratory syndrome coronavirus 2
TVSWNLREMLAH

SEQ ID NO: 21581 - protein, 13 aa, Severe acute respiratory syndrome-related coronavirus
  REGION 1..13: note = Table B: HLA-DRB1*14:01L
  source 1..13: note = Severe acute respiratory syndrome coronavirus 2
STIQRKYKGIKIQ

SEQ ID NO: 21582 - protein, 11 aa, Severe acute respiratory syndrome-related coronavirus
  REGION 1..11: note = Table B: HLA-DRB1*14:01L HLA-DRB1*08:01L
  source 1..11: note = Severe acute respiratory syndrome coronavirus 2
YFYTSKTTVAS

SEQ ID NO: 21583 - protein, 12 aa, Severe acute respiratory syndrome-related coronavirus
  REGION 1..12: note = Table B: HLA-DRB1*14:01L
  source 1..12: note = Severe acute respiratory syndrome coronavirus 2
LNLEEAARYMRS

SEQ ID NO: 21584 - protein, 12 aa, Severe acute respiratory syndrome-related coronavirus
  REGION 1..12: note = Table B: HLA-DRB1*14:01L HLA-DRB1*08:01L
  source 1..12: note = Severe acute respiratory syndrome coronavirus 2
AARYMRSLKVPA

SEQ ID NO: 21585 - protein, 14 aa, Severe acute respiratory syndrome-related coronavirus
  REGION 1..14: note = Table B: HLA-DRB1*14:01L HLA-DPA1*02:01-B1*13:01L HLA-DPA1*03:01-B1*105:01L
  source 1..14: note = Severe acute respiratory syndrome coronavirus 2
DNLKTLLSLREVRT

SEQ ID NO: 21586 - protein, 12 aa, Severe acute respiratory syndrome-related coronavirus
  REGION 1..12: note = Table B: HLA-DRB1*14:01L
  source 1..12: note = Severe acute respiratory syndrome coronavirus 2
SALNHTKKWKYP

SEQ ID NO: 21587 - protein, 12 aa, Severe acute respiratory syndrome-related coronavirus
  REGION 1..12: note = Table B: HLA-DRB1*14:01L HLA-DQA1*05:01-B1*02:01L HLA-DRB1*12:01L
  source 1..12: note = Severe acute respiratory syndrome coronavirus 2
ATALLTLQQIEL

SEQ ID NO: 21588 - protein, 12 aa, Severe acute respiratory syndrome-related coronavirus
  REGION 1..12: note = Table B: HLA-DRB1*14:01L HLA-DRB1*15:03L
  source 1..12: note = Severe acute respiratory syndrome coronavirus 2
LGDVRETMSYLF

SEQ ID NO: 21589 - protein, 12 aa, Severe acute respiratory syndrome-related coronavirus
  REGION 1..12: note = Table B: HLA-DRB1*14:01L HLA-DRB1*08:01L
  source 1..12: note = Severe acute respiratory syndrome coronavirus 2
HANLDSCKRVLN

SEQ ID NO: 21590 - protein, 13 aa, Severe acute respiratory syndrome-related coronavirus
  REGION 1..13: note = Table B: HLA-DRB1*14:01L
  source 1..13: note = Severe acute respiratory syndrome coronavirus 2
GVEAVMYMGTLSY

SEQ ID NO: 21591 - protein, 13 aa, Severe acute respiratory syndrome-related coronavirus
  REGION 1..13: note = Table B: HLA-DRB1*14:01L HLA-DRB1*08:01L HLA-DRB1*12:01L
  source 1..13: note = Severe acute respiratory syndrome coronavirus 2
APPAQYELKHGTF

SEQ ID NO: 21592 - protein, 13 aa, Severe acute respiratory syndrome-related coronavirus
  REGION 1..13: note = Table B: HLA-DRB1*14:01L HLA-DRB1*08:01L HLA-DQA1*03:01-B1*03:02L
  source 1..13: note = Severe acute respiratory syndrome coronavirus 2
PPAQYELKHGTFT

SEQ ID NO: 21593 - protein, 13 aa, Severe acute respiratory syndrome-related coronavirus
  REGION 1..13: note = Table B: HLA-DRB1*14:01L
  source 1..13: note = Severe acute respiratory syndrome coronavirus 2
GALLTKSSEYKGP

SEQ ID NO: 21594 - protein, 16 aa, Severe acute respiratory syndrome-related coronavirus
  REGION 1..16: note = Table B: HLA-DRB1*14:01L
  source 1..16: note = Severe acute respiratory syndrome coronavirus 2
DVFYKENSYTTTIKPV

SEQ ID NO: 21595 - protein, 13 aa, Severe acute respiratory syndrome-related coronavirus
  REGION 1..13: note = Table B: HLA-DRB1*14:01L HLA-DPA1*02:01-B1*13:01L
  source 1..13: note = Severe acute respiratory syndrome coronavirus 2
LTGYKKPASRELK

SEQ ID NO: 21596 - protein, 13 aa, Severe acute respiratory syndrome-related coronavirus
  REGION 1..13: note = Table B: HLA-DRB1*14:01L
  source 1..13: note = Severe acute respiratory syndrome coronavirus 2
KDVLECNVKTTEV

SEQ ID NO: 21597 - protein, 13 aa, Severe acute respiratory syndrome-related coronavirus
  REGION 1..13: note = Table B: HLA-DRB1*14:01L HLA-DQA1*01:03-B1*06:01L
  source 1..13: note = Severe acute respiratory syndrome coronavirus 2
DVLECNVKTTEVV

SEQ ID NO: 21598 - protein, 13 aa, Severe acute respiratory syndrome-related coronavirus
  REGION 1..13: note = Table B: HLA-DRB1*14:01L HLA-DRB1*14:54L HLA-DPA1*01:02-B1*04:01L HLA-DRB1*04:08L
  source 1..13: note = Severe acute respiratory syndrome coronavirus 2
VDNSSLTIKKPNE

SEQ ID NO: 21599 - protein, 12 aa, Severe acute respiratory syndrome-related coronavirus
  REGION 1..12: note = Table B: HLA-DRB1*14:01L
  source 1..12: note = Severe acute respiratory syndrome coronavirus 2
LGLKTLATHGLA

SEQ ID NO: 21600 - protein, 13 aa, Severe acute respiratory syndrome-related coronavirus
  REGION 1..13: note = Table B: HLA-DRB1*14:01L HLA-DRB1*08:01L
  source 1..13: note = Severe acute respiratory syndrome coronavirus 2
SVPWDTIANYAKP

SEQ ID NO: 21601 - protein, 12 aa, Severe acute respiratory syndrome-related coronavirus
  REGION 1..12: note = Table B: HLA-DRB1*14:01L
  source 1..12: note = Severe acute respiratory syndrome coronavirus 2
TTIAKNTVKSVG

SEQ ID NO: 21602 - protein, 13 aa, Severe acute respiratory syndrome-related coronavirus
  REGION 1..13: note = Table B: HLA-DRB1*14:01L
  source 1..13: note = Severe acute respiratory syndrome coronavirus 2
KNTVKSVGKFCLE

SEQ ID NO: 21603 - protein, 13 aa, Severe acute respiratory syndrome-related coronavirus
  REGION 1..13: note = Table B: HLA-DRB1*14:01L
  source 1..13: note = Severe acute respiratory syndrome coronavirus 2
VARDLSLQFKRPI

SEQ ID NO: 21604 - protein, 12 aa, Severe acute respiratory syndrome-related coronavirus
  REGION 1..12: note = Table B: HLA-DRB1*14:01L
  source 1..12: note = Severe acute respiratory syndrome coronavirus 2
RDLSLQFKRPIN

SEQ ID NO: 21605 - protein, 14 aa, Severe acute respiratory syndrome-related coronavirus
  REGION 1..14: note = Table B: HLA-DRB1*14:01L HLA-DRB3*01:01L
  source 1..14: note = Severe acute respiratory syndrome coronavirus 2
QKTYERHSLSHFVN

SEQ ID NO: 21606 - protein, 13 aa, Severe acute respiratory syndrome-related coronavirus
  REGION 1..13: note = Table B: HLA-DRB1*14:01L
  source 1..13: note = Severe acute respiratory syndrome coronavirus 2
LDNLRANNTKGSL

SEQ ID NO: 21607 - protein, 10 aa, Severe acute respiratory syndrome-related coronavirus
  REGION 1..10: note = Table B: HLA-DRB1*14:01L
  source 1..10: note = Severe acute respiratory syndrome coronavirus 2
IVFDGKSKCE

SEQ ID NO: 21608 - protein, 12 aa, Severe acute respiratory syndrome-related coronavirus
  REGION 1..12: note = Table B: HLA-DRB1*14:01L
  source 1..12: note = Severe acute respiratory syndrome coronavirus 2
NVPMEKLKTLVA

SEQ ID NO: 21609 - protein, 12 aa, Severe acute respiratory syndrome-related coronavirus
  REGION 1..12: note = Table B: HLA-DRB1*14:01L HLA-DRB1*15:03L
  source 1..12: note = Severe acute respiratory syndrome coronavirus 2
AELAKNVSLDNV

SEQ ID NO: 21610 - protein, 10 aa, Severe acute respiratory syndrome-related coronavirus
  REGION 1..10: note = Table B: HLA-DRB1*14:01L HLA-DQA1*02:01-B1*03:03L HLA-DRB1*15:03L
  source 1..10: note = Severe acute respiratory syndrome coronavirus 2
FISAARQGFV

SEQ ID NO: 21611 - protein, 13 aa, Severe acute respiratory syndrome-related coronavirus
  REGION 1..13: note = Table B: HLA-DRB1*14:01L HLA-DRB1*15:03L
  source 1..13: note = Severe acute respiratory syndrome coronavirus 2
HINAQVAKSHNIA

SEQ ID NO: 21612 - protein, 13 aa, Severe acute respiratory syndrome-related coronavirus
  REGION 1..13: note = Table B: HLA-DRB1*14:01L HLA-DRB1*08:01L
  source 1..13: note = Severe acute respiratory syndrome coronavirus 2
KQIRSAAKKNNLP

SEQ ID NO: 21613 - protein, 13 aa, Severe acute respiratory syndrome-related coronavirus
  REGION 1..13: note = Table B: HLA-DRB1*14:01L HLA-DRB1*08:01L
  source 1..13: note = Severe acute respiratory syndrome coronavirus 2
QIRSAAKKNNLPF

SEQ ID NO: 21614 - protein, 11 aa, Severe acute respiratory syndrome-related coronavirus
  REGION 1..11: note = Table B: HLA-DRB1*14:01L HLA-DPA1*01:02-B1*04:01L HLA-DRB1*16:01L HLA-DRB1*15:03L
  source 1..11: note = Severe acute respiratory syndrome coronavirus 2
IVNNWLKQLIK

SEQ ID NO: 21615 - protein, 12 aa, Severe acute respiratory syndrome-related coronavirus
  REGION 1..12: note = Table B: HLA-DRB1*14:01L
  source 1..12: note = Severe acute respiratory syndrome coronavirus 2
NNWLKQLIKVTL

SEQ ID NO: 21616 - protein, 14 aa, Severe acute respiratory syndrome-related coronavirus
  REGION 1..14: note = Table B: HLA-DRB1*14:01L HLA-DRB1*12:01L HLA-DRB1*15:03L
  source 1..14: note = Severe acute respiratory syndrome coronavirus 2
TRDIASTDTCFANK

SEQ ID NO: 21617 - protein, 14 aa, Severe acute respiratory syndrome-related coronavirus
  REGION 1..14: note = Table B: HLA-DRB1*14:01L HLA-DRB1*11:04L HLA-DRB1*11:01L HLA-DRB1*12:01L HLA-DRB3*01:01L HLA-DRB1*15:03L
  source 1..14: note = Severe acute respiratory syndrome coronavirus 2
RDIASTDTCFANKH

SEQ ID NO: 21618 - protein, 11 aa, Severe acute respiratory syndrome-related coronavirus
  REGION 1..11: note = Table B: HLA-DRB1*14:01L HLA-DQA1*03:01-B1*03:02L
  source 1..11: note = Severe acute respiratory syndrome coronavirus 2
DTWFSQRGGSY

SEQ ID NO: 21619 - protein, 10 aa, Severe acute respiratory syndrome-related coronavirus
  REGION 1..10: note = Table B: HLA-DRB1*14:01L
  source 1..10: note = Severe acute respiratory syndrome coronavirus 2
LHFLPRVFSA

SEQ ID NO: 21620 - protein, 12 aa, Severe acute respiratory syndrome-related coronavirus
  REGION 1..12: note = Table B: HLA-DRB1*14:01L HLA-DPA1*02:01-B1*13:01L
  source 1..12: note = Severe acute respiratory syndrome coronavirus 2
VAYESLRPDTRY

SEQ ID NO: 21621 - protein, 12 aa, Severe acute respiratory syndrome-related coronavirus
  REGION 1..12: note = Table B: HLA-DRB1*14:01L HLA-DRB1*12:01L HLA-DRB1*16:01L HLA-DRB1*15:03L
  source 1..12: note = Severe acute respiratory syndrome coronavirus 2
TPLIQPIGALDI

SEQ ID NO: 21622 - protein, 12 aa, Severe acute respiratory syndrome-related coronavirus
  REGION 1..12: note = Table B: HLA-DRB1*14:01L HLA-DPA1*01:03-B1*04:01L HLA-DPA1*01:03-B1*04:02L HLA-DRB1*12:01L
  source 1..12: note = Severe acute respiratory syndrome coronavirus 2
VSFLAHIQWMVM

SEQ ID NO: 21623 - protein, 12 aa, Severe acute respiratory syndrome-related coronavirus
  REGION 1..12: note = Table B: HLA-DRB1*14:01L HLA-DRB1*12:01L HLA-DPA1*01:02-B1*04:01L HLA-DRB1*16:01L HLA-DRB1*15:03L
  source 1..12: note = Severe acute respiratory syndrome coronavirus 2
KEMYLKLRSDVL

SEQ ID NO: 21624 - protein, 11 aa, Severe acute respiratory syndrome-related coronavirus
  REGION 1..11: note = Table B: HLA-DRB1*14:01L
  source 1..11: note = Severe acute respiratory syndrome coronavirus 2
LPLTQYNRYLA

SEQ ID NO: 21625 - protein, 10 aa, Severe acute respiratory syndrome-related coronavirus
  REGION 1..10: note = Table B: HLA-DRB1*14:01L HLA-DRB1*15:03L
  source 1..10: note = Severe acute respiratory syndrome coronavirus 2
LALYNKYKYF

SEQ ID NO: 21626 - protein, 18 aa, Severe acute respiratory syndrome-related coronavirus
  REGION 1..18: note = Table B: HLA-DRB1*14:01L
  source 1..18: note = Severe acute respiratory syndrome coronavirus 2
QPPQTSITSAVLQSGFRK

SEQ ID NO: 21627 - protein, 12 aa, Severe acute respiratory syndrome-related coronavirus
  REGION 1..12: note = Table B: HLA-DRB1*14:01L HLA-DRB1*15:03L
  source 1..12: note = Severe acute respiratory syndrome coronavirus 2
TSAVLQSGFRKM

SEQ ID NO: 21628 - protein, 11 aa, Severe acute respiratory syndrome-related coronavirus
  REGION 1..11: note = Table B: HLA-DRB1*14:01L
  source 1..11: note = Severe acute respiratory syndrome coronavirus 2
DDVVYCPRHVI

SEQ ID NO: 21629 - protein, 12 aa, Severe acute respiratory syndrome-related coronavirus
  REGION 1..12: note = Table B: HLA-DRB1*14:01L
  source 1..12: note = Severe acute respiratory syndrome coronavirus 2
EDLLIRKSNHNF

SEQ ID NO: 21630 - protein, 10 aa, Severe acute respiratory syndrome-related coronavirus
  REGION 1..10: note = Table B: HLA-DRB1*14:01L
  source 1..10: note = Severe acute respiratory syndrome coronavirus 2
LIRKSNHNFL

SEQ ID NO: 21631 - protein, 14 aa, Severe acute respiratory syndrome-related coronavirus
  REGION 1..14: note = Table B: HLA-DRB1*14:01L HLA-DRB1*11:04L HLA-DPA1*03:01-B1*105:01L HLA-DQA1*05:05-B1*03:01L
  source 1..14: note = Severe acute respiratory syndrome coronavirus 2
QDHVDILGPLSAQT

SEQ ID NO: 21632 - protein, 12 aa, Severe acute respiratory syndrome-related coronavirus
  REGION 1..12: note = Table B: HLA-DRB1*14:01L
  source 1..12: note = Severe acute respiratory syndrome coronavirus 2
GVTFQSAVKRTI

SEQ ID NO: 21633 - protein, 11 aa, Severe acute respiratory syndrome-related coronavirus
  REGION 1..11: note = Table B: HLA-DRB1*14:01L
  source 1..11: note = Severe acute respiratory syndrome coronavirus 2
RTIKGTHHWLL

SEQ ID NO: 21634 - protein, 12 aa, Severe acute respiratory syndrome-related coronavirus
  REGION 1..12: note = Table B: HLA-DRB1*14:01L HLA-DRB1*12:01L HLA-DRB1*15:03L
  source 1..12: note = Severe acute respiratory syndrome coronavirus 2
FAMMFVKHKHAF

SEQ ID NO: 21635 - protein, 11 aa, Severe acute respiratory syndrome-related coronavirus
  REGION 1..11: note = Table B: HLA-DRB1*14:01L HLA-DPA1*01:03-B1*104:01L HLA-DRB1*15:03L
  source 1..11: note = Severe acute respiratory syndrome coronavirus 2
MVDTSLSGFKL

SEQ ID NO: 21636 - protein, 15 aa, Severe acute respiratory syndrome-related coronavirus
  REGION 1..15: note = Table B: HLA-DRB1*14:01L HLA-DRB1*12:01L
  source 1..15: note = Severe acute respiratory syndrome coronavirus 2
LSGFKLKDCVMYASA

SEQ ID NO: 21637 - protein, 11 aa, Severe acute respiratory syndrome-related coronavirus
  REGION 1..11: note = Table B: HLA-DRB1*14:01L
  source 1..11: note = Severe acute respiratory syndrome coronavirus 2
VLTLVYKVYYG

SEQ ID NO: 21638 - protein, 13 aa, Severe acute respiratory syndrome-related coronavirus
  REGION 1..13: note = Table B: HLA-DRB1*14:01L
  source 1..13: note = Severe acute respiratory syndrome coronavirus 2
DSEVVLKKLKKSL

SEQ ID NO: 21639 - protein, 12 aa, Severe acute respiratory syndrome-related coronavirus
  REGION 1..12: note = Table B: HLA-DRB1*14:01L
  source 1..12: note = Severe acute respiratory syndrome coronavirus 2
AMTQMYKQARSE

SEQ ID NO: 21640 - protein, 12 aa, Severe acute respiratory syndrome-related coronavirus
  REGION 1..12: note = Table B: HLA-DRB1*14:01L
  source 1..12: note = Severe acute respiratory syndrome coronavirus 2
LNNIINNARDGC

SEQ ID NO: 21641 - protein, 12 aa, Severe acute respiratory syndrome-related coronavirus
  REGION 1..12: note = Table B: HLA-DRB1*14:01L HLA-DRB1*15:03L
  source 1..12: note = Severe acute respiratory syndrome coronavirus 2
NIINNARDGCVP

SEQ ID NO: 21642 - protein, 12 aa, Severe acute respiratory syndrome-related coronavirus
  REGION 1..12: note = Table B: HLA-DRB1*14:01L
  source 1..12: note = Severe acute respiratory syndrome coronavirus 2
IINNARDGCVPL

SEQ ID NO: 21643 - protein, 15 aa, Severe acute respiratory syndrome-related coronavirus
  REGION 1..15: note = Table B: HLA-DRB1*14:01L HLA-DRB1*11:01L HLA-DRB1*08:02L
  source 1..15: note = Severe acute respiratory syndrome coronavirus 2
GTTFTYASALWEIQQ

SEQ ID NO: 21644 - protein, 13 aa, Severe acute respiratory syndrome-related coronavirus
  REGION 1..13: note = Table B: HLA-DRB1*14:01L
  source 1..13: note = Severe acute respiratory syndrome coronavirus 2
EISMDNSPNLAWP

SEQ ID NO: 21645 - protein, 11 aa, Severe acute respiratory syndrome-related coronavirus
  REGION 1..11: note = Table B: HLA-DRB1*14:01L
  source 1..11: note = Severe acute respiratory syndrome coronavirus 2
RANSAVKLQNN

SEQ ID NO: 21646 - protein, 15 aa, Severe acute respiratory syndrome-related coronavirus
  REGION 1..15: note = Table B: HLA-DRB1*14:01L
  source 1..15: note = Severe acute respiratory syndrome coronavirus 2
VLALLSDLQDLKWAR

SEQ ID NO: 21647 - protein, 12 aa, Severe acute respiratory syndrome-related coronavirus
  REGION 1..12: note = Table B: HLA-DRB1*14:01L
  source 1..12: note = Severe acute respiratory syndrome coronavirus 2
IKGLNNLNRGMV

SEQ ID NO: 21648 - protein, 11 aa, Severe acute respiratory syndrome-related coronavirus
  REGION 1..11: note = Table B: HLA-DRB1*14:01L
  source 1..11: note = Severe acute respiratory syndrome coronavirus 2
GLNNLNRGMVL

SEQ ID NO: 21649 - protein, 11 aa, Severe acute respiratory syndrome-related coronavirus
  REGION 1..11: note = Table B: HLA-DRB1*14:01L
  source 1..11: note = Severe acute respiratory syndrome coronavirus 2
LNNLNRGMVLG

SEQ ID NO: 21650 - protein, 11 aa, Severe acute respiratory syndrome-related coronavirus
  REGION 1..11: note = Table B: HLA-DRB1*14:01L HLA-DRB1*14:54L
  source 1..11: note = Severe acute respiratory syndrome coronavirus 2
GSLAATVRLQA

SEQ ID NO: 21651 - protein, 12 aa, Severe acute respiratory syndrome-related coronavirus
  REGION 1..12: note = Table B: HLA-DRB1*14:01L
  source 1..12: note = Severe acute respiratory syndrome coronavirus 2
YFVVKRHTFSNY

SEQ ID NO: 21652 - protein, 12 aa, Severe acute respiratory syndrome-related coronavirus
  REGION 1..12: note = Table B: HLA-DRB1*14:01L
  source 1..12: note = Severe acute respiratory syndrome coronavirus 2
MADLVYALRHFD

SEQ ID NO: 21653 - protein, 13 aa, Severe acute respiratory syndrome-related coronavirus
  REGION 1..13: note = Table B: HLA-DRB1*14:01L HLA-DRB1*11:04L HLA-DRB1*08:01L HLA-DRB1*15:01L
  source 1..13: note = Severe acute respiratory syndrome coronavirus 2
PDILRVYANLGER

SEQ ID NO: 21654 - protein, 13 aa, Severe acute respiratory syndrome-related coronavirus
  REGION 1..13: note = Table B: HLA-DRB1*14:01L
  source 1..13: note = Severe acute respiratory syndrome coronavirus 2
TKPYIKWDLLKYD

SEQ ID NO: 21655 - protein, 12 aa, Severe acute respiratory syndrome-related coronavirus
  REGION 1..12: note = Table B: HLA-DRB1*14:01L HLA-DRB1*16:01L
  source 1..12: note = Severe acute respiratory syndrome coronavirus 2
ERLKLFDRYFKY

SEQ ID NO: 21656 - protein, 12 aa, Severe acute respiratory syndrome-related coronavirus
  REGION 1..12: note = Table B: HLA-DRB1*14:01L
  source 1..12: note = Severe acute respiratory syndrome coronavirus 2
PFVVSTGYHFRE

SEQ ID NO: 21657 - protein, 13 aa, Severe acute respiratory syndrome-related coronavirus
  REGION 1..13: note = Table B: HLA-DRB1*14:01L HLA-DRB1*12:01L
  source 1..13: note = Severe acute respiratory syndrome coronavirus 2
QDVNLHSSRLSFK

SEQ ID NO: 21658 - protein, 11 aa, Severe acute respiratory syndrome-related coronavirus
  REGION 1..11: note = Table B: HLA-DRB1*14:01L
  source 1..11: note = Severe acute respiratory syndrome coronavirus 2
GNLLLDKRTTC

SEQ ID NO: 21659 - protein, 15 aa, Severe acute respiratory syndrome-related coronavirus
  REGION 1..15: note = Table B: HLA-DRB1*14:01L
  source 1..15: note = Severe acute respiratory syndrome coronavirus 2
EGSSVELKHFFFAQD

SEQ ID NO: 21660 - protein, 11 aa, Severe acute respiratory syndrome-related coronavirus
  REGION 1..11: note = Table B: HLA-DRB1*14:01L
  source 1..11: note = Severe acute respiratory syndrome coronavirus 2
NNLDKSAGFPF

SEQ ID NO: 21661 - protein, 11 aa, Severe acute respiratory syndrome-related coronavirus
  REGION 1..11: note = Table B: HLA-DRB1*14:01L
  source 1..11: note = Severe acute respiratory syndrome coronavirus 2
FPFNKWGKARL

SEQ ID NO: 21662 - protein, 12 aa, Severe acute respiratory syndrome-related coronavirus
  REGION 1..12: note = Table B: HLA-DRB1*14:01L HLA-DRB1*14:54L
  source 1..12: note = Severe acute respiratory syndrome coronavirus 2
DALFAYTKRNVI

SEQ ID NO: 21663 - protein, 13 aa, Severe acute respiratory syndrome-related coronavirus
  REGION 1..13: note = Table B: HLA-DRB1*14:01L
  source 1..13: note = Severe acute respiratory syndrome coronavirus 2
MPNMLRIMASLVL

SEQ ID NO: 21664 - protein, 15 aa, Severe acute respiratory syndrome-related coronavirus
  REGION 1..15: note = Table B: HLA-DRB1*14:01L
  source 1..15: note = Severe acute respiratory syndrome coronavirus 2
MLRIMASLVLARKHT

SEQ ID NO: 21665 - protein, 11 aa, Severe acute respiratory syndrome-related coronavirus
  REGION 1..11: note = Table B: HLA-DRB1*14:01L
  source 1..11: note = Severe acute respiratory syndrome coronavirus 2
ASLVLARKHTT

SEQ ID NO: 21666 - protein, 11 aa, Severe acute respiratory syndrome-related coronavirus
  REGION 1..11: note = Table B: HLA-DRB1*14:01L HLA-DRB1*11:01L HLA-DRB1*04:08L
  source 1..11: note = Severe acute respiratory syndrome coronavirus 2
EFYAYLRKHFS

SEQ ID NO: 21667 - protein, 11 aa, Severe acute respiratory syndrome-related coronavirus
  REGION 1..11: note = Table B: HLA-DRB1*14:01L HLA-DQA1*03:01-B1*03:02L HLA-DRB1*16:01L
  source 1..11: note = Severe acute respiratory syndrome coronavirus 2
KSVLYYQNNVF

SEQ ID NO: 21668 - protein, 10 aa, Severe acute respiratory syndrome-related coronavirus
  REGION 1..10: note = Table B: HLA-DRB1*14:01L HLA-DRB1*12:01L HLA-DRB1*16:01L HLA-DRB1*15:03L
  source 1..10: note = Severe acute respiratory syndrome coronavirus 2
VISTSHKLVL

SEQ ID NO: 21669 - protein, 11 aa, Severe acute respiratory syndrome-related coronavirus
  REGION 1..11: note = Table B: HLA-DRB1*14:01L
  source 1..11: note = Severe acute respiratory syndrome coronavirus 2
YYCKSHKPPIS

SEQ ID NO: 21670 - protein, 10 aa, Severe acute respiratory syndrome-related coronavirus
  REGION 1..10: note = Table B: HLA-DRB1*14:01L
  source 1..10: note = Severe acute respiratory syndrome coronavirus 2
VTKNSKVQIG

SEQ ID NO: 21671 - protein, 13 aa, Severe acute respiratory syndrome-related coronavirus
  REGION 1..13: note = Table B: HLA-DRB1*14:01L HLA-DRB1*16:01L HLA-DRB1*15:03L
  source 1..13: note = Severe acute respiratory syndrome coronavirus 2
PTLVPQEHYVRIT

SEQ ID NO: 21672 - protein, 12 aa, Severe acute respiratory syndrome-related coronavirus
  REGION 1..12: note = Table B: HLA-DRB1*14:01L HLA-DRB1*16:01L
  source 1..12: note = Severe acute respiratory syndrome coronavirus 2
LVPQEHYVRITG

SEQ ID NO: 21673 - protein, 12 aa, Severe acute respiratory syndrome-related coronavirus
  REGION 1..12: note = Table B: HLA-DRB1*14:01L
  source 1..12: note = Severe acute respiratory syndrome coronavirus 2
LPIDKCSRIIPA

SEQ ID NO: 21674 - protein, 12 aa, Severe acute respiratory syndrome-related coronavirus
  REGION 1..12: note = Table B: HLA-DRB1*14:01L
  source 1..12: note = Severe acute respiratory syndrome coronavirus 2
ARVECFDKFKVN

SEQ ID NO: 21675 - protein, 12 aa, Severe acute respiratory syndrome-related coronavirus
  REGION 1..12: note = Table B: HLA-DRB1*14:01L HLA-DRB1*14:54L
  source 1..12: note = Severe acute respiratory syndrome coronavirus 2
KGVITHDVSSAI

SEQ ID NO: 21676 - protein, 15 aa, Severe acute respiratory syndrome-related coronavirus
  REGION 1..15: note = Table B: HLA-DRB1*14:01L HLA-DRB3*01:01L
  source 1..15: note = Severe acute respiratory syndrome coronavirus 2
VGILCIMSDRDLYDK

SEQ ID NO: 21677 - protein, 13 aa, Severe acute respiratory syndrome-related coronavirus
  REGION 1..13: note = Table B: HLA-DRB1*14:01L HLA-DRB1*08:01L
  source 1..13: note = Severe acute respiratory syndrome coronavirus 2
FTSLEIPRRNVAT

SEQ ID NO: 21678 - protein, 16 aa, Severe acute respiratory syndrome-related coronavirus
  REGION 1..16: note = Table B: HLA-DRB1*14:01L
  source 1..16: note = Severe acute respiratory syndrome coronavirus 2
SLEIPRRNVATLQAEN

SEQ ID NO: 21679 - protein, 12 aa, Severe acute respiratory syndrome-related coronavirus
  REGION 1..12: note = Table B: HLA-DRB1*14:01L HLA-DRB1*08:01L
  source 1..12: note = Severe acute respiratory syndrome coronavirus 2
TGLFKDCSKVIT

SEQ ID NO: 21680 - protein, 13 aa, Severe acute respiratory syndrome-related coronavirus
  REGION 1..13: note = Table B: HLA-DRB1*14:01L
  source 1..13: note = Severe acute respiratory syndrome coronavirus 2
PTHLSVDTKFKTE

SEQ ID NO: 21681 - protein, 12 aa, Severe acute respiratory syndrome-related coronavirus
  REGION 1..12: note = Table B: HLA-DRB1*14:01L HLA-DRB1*15:03L
  source 1..12: note = Severe acute respiratory syndrome coronavirus 2
GFKMNYQVNGYP

SEQ ID NO: 21682 - protein, 14 aa, Severe acute respiratory syndrome-related coronavirus
  REGION 1..14: note = Table B: HLA-DRB1*14:01L
  source 1..14: note = Severe acute respiratory syndrome coronavirus 2
NLVAVPTGYVDTPN

SEQ ID NO: 21683 - protein, 13 aa, Severe acute respiratory syndrome-related coronavirus
  REGION 1..13: note = Table B: HLA-DRB1*14:01L HLA-DPA1*01:03-B1*04:01L HLA-DRB1*16:01L
  source 1..13: note = Severe acute respiratory syndrome coronavirus 2
SDRVVFVLWAHGF

SEQ ID NO: 21684 - protein, 12 aa, Severe acute respiratory syndrome-related coronavirus
  REGION 1..12: note = Table B: HLA-DRB1*14:01L HLA-DRB1*08:01L HLA-DPA1*01:03-B1*02:01L
  source 1..12: note = Severe acute respiratory syndrome coronavirus 2
FVLWAHGFELTS

SEQ ID NO: 21685 - protein, 11 aa, Severe acute respiratory syndrome-related coronavirus
  REGION 1..11: note = Table B: HLA-DRB1*14:01L
  source 1..11: note = Severe acute respiratory syndrome coronavirus 2
KYFVKIGPERT

SEQ ID NO: 21686 - protein, 14 aa, Severe acute respiratory syndrome-related coronavirus
  REGION 1..14: note = Table B: HLA-DRB1*14:01L HLA-DRB1*12:01L HLA-DRB3*01:01L HLA-DPA1*02:01-B1*13:01L HLA-DRB1*15:03L
  source 1..14: note = Severe acute respiratory syndrome coronavirus 2
SNHDLYCQVHGNAH

SEQ ID NO: 21687 - protein, 13 aa, Severe acute respiratory syndrome-related coronavirus
  REGION 1..13: note = Table B: HLA-DRB1*14:01L HLA-DQA1*05:01-B1*02:01L HLA-DRB1*12:01L HLA-DRB1*16:01L HLA-DQA1*01:03-B1*06:01L HLA-DRB1*15:03L
  source 1..13: note = Severe acute respiratory syndrome coronavirus 2
DAQPCSDKAYKIE

SEQ ID NO: 21688 - protein, 13 aa, Severe acute respiratory syndrome-related coronavirus
  REGION 1..13: note = Table B: HLA-DRB1*14:01L HLA-DRB1*12:01L HLA-DRB1*04:08L
  source 1..13: note = Severe acute respiratory syndrome coronavirus 2
YSYATHSDKFTDG

SEQ ID NO: 21689 - protein, 12 aa, Severe acute respiratory syndrome-related coronavirus
  REGION 1..12: note = Table B: HLA-DRB1*14:01L HLA-DRB1*08:01L
  source 1..12: note = Severe acute respiratory syndrome coronavirus 2
GSLYVNKHAFHT

SEQ ID NO: 21690 - protein, 12 aa, Severe acute respiratory syndrome-related coronavirus
  REGION 1..12: note = Table B: HLA-DRB1*14:01L HLA-DRB1*08:01L
  source 1..12: note = Severe acute respiratory syndrome coronavirus 2
SLYVNKHAFHTP

SEQ ID NO: 21691 - protein, 12 aa, Severe acute respiratory syndrome-related coronavirus
  REGION 1..12: note = Table B: HLA-DRB1*14:01L
  source 1..12: note = Severe acute respiratory syndrome coronavirus 2
VNLKQLPFFYYS

SEQ ID NO: 21692 - protein, 12 aa, Severe acute respiratory syndrome-related coronavirus
  REGION 1..12: note = Table B: HLA-DRB1*14:01L HLA-DRB1*12:01L HLA-DRB1*04:08L HLA-DRB1*15:01L
  source 1..12: note = Severe acute respiratory syndrome coronavirus 2
VYKQFDTYNLWN

SEQ ID NO: 21693 - protein, 12 aa, Severe acute respiratory syndrome-related coronavirus
  REGION 1..12: note = Table B: HLA-DRB1*14:01L HLA-DRB1*08:01L
  source 1..12: note = Severe acute respiratory syndrome coronavirus 2
QSLENVAFNVVN

SEQ ID NO: 21694 - protein, 12 aa, Severe acute respiratory syndrome-related coronavirus
  REGION 1..12: note = Table B: HLA-DRB1*14:01L HLA-DRB1*11:01L
  source 1..12: note = Severe acute respiratory syndrome coronavirus 2
SLENVAFNVVNK

SEQ ID NO: 21695 - protein, 16 aa, Severe acute respiratory syndrome-related coronavirus
  REGION 1..16: note = Table B: HLA-DRB1*14:01L
  source 1..16: note = Severe acute respiratory syndrome coronavirus 2
LPVNVAFELWAKRNIK

SEQ ID NO: 21696 - protein, 11 aa, Severe acute respiratory syndrome-related coronavirus
  REGION 1..11: note = Table B: HLA-DRB1*14:01L
  source 1..11: note = Severe acute respiratory syndrome coronavirus 2
FELWAKRNIKP

SEQ ID NO: 21697 - protein, 12 aa, Severe acute respiratory syndrome-related coronavirus
  REGION 1..12: note = Table B: HLA-DRB1*14:01L HLA-DPA1*01:02-B1*04:01L HLA-DRB1*16:01L
  source 1..12: note = Severe acute respiratory syndrome coronavirus 2
NTVIWDYKRDAP

SEQ ID NO: 21698 - protein, 12 aa, Severe acute respiratory syndrome-related coronavirus
  REGION 1..12: note = Table B: HLA-DRB1*14:01L
  source 1..12: note = Severe acute respiratory syndrome coronavirus 2
IWDYKRDAPAHI

SEQ ID NO: 21699 - protein, 11 aa, Severe acute respiratory syndrome-related coronavirus
  REGION 1..11: note = Table B: HLA-DRB1*14:01L HLA-DPA1*01:02-B1*04:01L HLA-DRB1*16:01L
  source 1..11: note = Severe acute respiratory syndrome coronavirus 2
DLFRNARNGVL

SEQ ID NO: 21700 - protein, 14 aa, Severe acute respiratory syndrome-related coronavirus
  REGION 1..14: note = Table B: HLA-DRB1*14:01L HLA-DRB1*12:01L HLA-DPA1*02:01-B1*13:01L HLA-DQA1*01:03-B1*06:01L HLA-DRB1*15:03L
  source 1..14: note = Severe acute respiratory syndrome coronavirus 2
SRNLQEFKPRSQME

SEQ ID NO: 21701 - protein, 12 aa, Severe acute respiratory syndrome-related coronavirus
  REGION 1..12: note = Table B: HLA-DRB1*14:01L
  source 1..12: note = Severe acute respiratory syndrome coronavirus 2
DEFIERYKLEGY

SEQ ID NO: 21702 - protein, 12 aa, Severe acute respiratory syndrome-related coronavirus
  REGION 1..12: note = Table B: HLA-DRB1*14:01L
  source 1..12: note = Severe acute respiratory syndrome coronavirus 2
HLLIGLAKRFKE

SEQ ID NO: 21703 - protein, 13 aa, Severe acute respiratory syndrome-related coronavirus
  REGION 1..13: note = Table B: HLA-DRB1*14:01L
  source 1..13: note = Severe acute respiratory syndrome coronavirus 2
LIGLAKRFKESPF

SEQ ID NO: 21704 - protein, 11 aa, Severe acute respiratory syndrome-related coronavirus
  REGION 1..11: note = Table B: HLA-DRB1*14:01L
  source 1..11: note = Severe acute respiratory syndrome coronavirus 2
EIIKSQDLSVV

SEQ ID NO: 21705 - protein, 11 aa, Severe acute respiratory syndrome-related coronavirus
  REGION 1..11: note = Table B: HLA-DRB1*14:01L
  source 1..11: note = Severe acute respiratory syndrome coronavirus 2
VVSKVVKVTID

SEQ ID NO: 21706 - protein, 16 aa, Severe acute respiratory syndrome-related coronavirus
  REGION 1..16: note = Table B: HLA-DRB1*14:01L
  source 1..16: note = Severe acute respiratory syndrome coronavirus 2
SSQAWQPGVAMPNLYK

SEQ ID NO: 21707 - protein, 12 aa, Severe acute respiratory syndrome-related coronavirus
  REGION 1..12: note = Table B: HLA-DRB1*14:01L
  source 1..12: note = Severe acute respiratory syndrome coronavirus 2
MPNLYKMQRMLL

SEQ ID NO: 21708 - protein, 12 aa, Severe acute respiratory syndrome-related coronavirus
  REGION 1..12: note = Table B: HLA-DRB1*14:01L
  source 1..12: note = Severe acute respiratory syndrome coronavirus 2
PNLYKMQRMLLE

SEQ ID NO: 21709 - protein, 12 aa, Severe acute respiratory syndrome-related coronavirus
  REGION 1..12: note = Table B: HLA-DRB1*14:01L HLA-DRB1*12:01L
  source 1..12: note = Severe acute respiratory syndrome coronavirus 2
GSVAIKITEHSW

SEQ ID NO: 21710 - protein, 12 aa, Severe acute respiratory syndrome-related coronavirus
  REGION 1..12: note = Table B: HLA-DRB1*14:01L HLA-DPA1*02:01-B1*13:01L HLA-DQA1*05:05-B1*03:01L HLA-DPA1*01:02-B1*04:01L
  source 1..12: note = Severe acute respiratory syndrome coronavirus 2
EQIDGYVMHANY

SEQ ID NO: 21711 - protein, 12 aa, Severe acute respiratory syndrome-related coronavirus
  REGION 1..12: note = Table B: HLA-DRB1*14:01L HLA-DRB1*16:01L
  source 1..12: note = Severe acute respiratory syndrome coronavirus 2
TNPIQLSSYSLF

SEQ ID NO: 21712 - protein, 10 aa, Severe acute respiratory syndrome-related coronavirus
  REGION 1..10: note = Table B: HLA-DRB1*14:01L HLA-DRB1*15:03L
  source 1..10: note = Severe acute respiratory syndrome coronavirus 2
ILSLLSKGRL

SEQ ID NO: 21713 - protein, 13 aa, Severe acute respiratory syndrome-related coronavirus
  REGION 1..13: note = Table B: HLA-DRB1*14:01L
  source 1..13: note = Severe acute respiratory syndrome coronavirus 2
SKGRLIIRENNRV

SEQ ID NO: 21714 - protein, 10 aa, Severe acute respiratory syndrome-related coronavirus
  REGION 1..10: note = Table B: HLA-DRB1*14:01L HLA-DRB1*16:01L
  source 1..10: note = Severe acute respiratory syndrome coronavirus 2
IIRENNRVVI

SEQ ID NO: 21715 - protein, 17 aa, Severe acute respiratory syndrome-related coronavirus
  REGION 1..17: note = Table B: HLA-DRB1*14:01L
  source 1..17: note = Severe acute respiratory syndrome coronavirus 2
AIHVSGTNGTKRFDNPV

SEQ ID NO: 21716 - protein, 15 aa, Severe acute respiratory syndrome-related coronavirus
  REGION 1..15: note = Table B: HLA-DRB1*14:01L HLA-DRB1*14:02L HLA-DRB1*11:01L HLA-DRB1*08:03L
  source 1..15: note = Severe acute respiratory syndrome coronavirus 2
IIRGWIFGTTLDSKT

SEQ ID NO: 21717 - protein, 12 aa, Severe acute respiratory syndrome-related coronavirus
  REGION 1..12: note = Table B: HLA-DRB1*14:01L
  source 1..12: note = Severe acute respiratory syndrome coronavirus 2
TNVVIKVCEFQF

SEQ ID NO: 21718 - protein, 12 aa, Severe acute respiratory syndrome-related coronavirus
  REGION 1..12: note = Table B: HLA-DRB1*14:01L HLA-DRB1*08:01L HLA-DRB1*04:08L
  source 1..12: note = Severe acute respiratory syndrome coronavirus 2
LGVYYHKNNKSW

SEQ ID NO: 21719 - protein, 11 aa, Severe acute respiratory syndrome-related coronavirus
  REGION 1..11: note = Table B: HLA-DRB1*14:01L
  source 1..11: note = Severe acute respiratory syndrome coronavirus 2
VYYHKNNKSWM

SEQ ID NO: 21720 - protein, 12 aa, Severe acute respiratory syndrome-related coronavirus
  REGION 1..12: note = Table B: HLA-DRB1*14:01L
  source 1..12: note = Severe acute respiratory syndrome coronavirus 2
QGNFKNLREFVF

SEQ ID NO: 21721 - protein, 13 aa, Severe acute respiratory syndrome-related coronavirus
  REGION 1..13: note = Table B: HLA-DRB1*14:01L HLA-DRB1*08:01L HLA-DRB1*04:08L
  source 1..13: note = Severe acute respiratory syndrome coronavirus 2
FKNIDGYFKIYSK

SEQ ID NO: 21722 - protein, 10 aa, Severe acute respiratory syndrome-related coronavirus
  REGION 1..10: note = Table B: HLA-DRB1*14:01L
  source 1..10: note = Severe acute respiratory syndrome coronavirus 2
TLLALHRSYL

SEQ ID NO: 21723 - protein, 12 aa, Severe acute respiratory syndrome-related coronavirus
  REGION 1..12: note = Table B: HLA-DRB1*14:01L HLA-DQA1*01-B1*05L HLA-DRB1*15:03L
  source 1..12: note = Severe acute respiratory syndrome coronavirus 2
TFLLKYNENGTI

SEQ ID NO: 21724 - protein, 13 aa, Severe acute respiratory syndrome-related coronavirus
  REGION 1..13: note = Table B: HLA-DRB1*14:01L HLA-DRB1*11:01L
  source 1..13: note = Severe acute respiratory syndrome coronavirus 2
TRFASVYAWNRKR

SEQ ID NO: 21725 - protein, 11 aa, Severe acute respiratory syndrome-related coronavirus
  REGION 1..11: note = Table B: HLA-DRB1*14:01L
  source 1..11: note = Severe acute respiratory syndrome coronavirus 2
SVYAWNRKRIS

SEQ ID NO: 21726 - protein, 13 aa, Severe acute respiratory syndrome-related coronavirus
  REGION 1..13: note = Table B: HLA-DRB1*14:01L
  source 1..13: note = Severe acute respiratory syndrome coronavirus 2
FVIRGDEVRQIAP

SEQ ID NO: 21727 - protein, 17 aa, Severe acute respiratory syndrome-related coronavirus
  REGION 1..17: note = Table B: HLA-DRB1*14:01L
  source 1..17: note = Severe acute respiratory syndrome coronavirus 2
APGQTGKIADYNYKLPD

SEQ ID NO: 21728 - protein, 12 aa, Severe acute respiratory syndrome-related coronavirus
  REGION 1..12: note = Table B: HLA-DRB1*14:01L HLA-DRB1*16:01L HLA-DRB1*04:08L
  source 1..12: note = Severe acute respiratory syndrome coronavirus 2
GGNYNYLYRLFR

SEQ ID NO: 21729 - protein, 11 aa, Severe acute respiratory syndrome-related coronavirus
  REGION 1..11: note = Table B: HLA-DRB1*14:01L HLA-DQA1*01-B1*05L HLA-DPA1*02:01-B1*13:01L HLA-DQA1*03:01-B1*03:02L HLA-DRB1*16:01L HLA-DQA1*02:01-B1*03:03L
  source 1..11: note = Severe acute respiratory syndrome coronavirus 2
KPFERDISTEI

SEQ ID NO: 21730 - protein, 12 aa, Severe acute respiratory syndrome-related coronavirus
  REGION 1..12: note = Table B: HLA-DRB1*14:01L
  source 1..12: note = Severe acute respiratory syndrome coronavirus 2
VLTESNKKFLPF

SEQ ID NO: 21731 - protein, 14 aa, Severe acute respiratory syndrome-related coronavirus
  REGION 1..14: note = Table B: HLA-DRB1*14:01L HLA-DQA1*05:01-B1*02:01L
  source 1..14: note = Severe acute respiratory syndrome coronavirus 2
TESNKKFLPFQQFG

SEQ ID NO: 21732 - protein, 11 aa, Severe acute respiratory syndrome-related coronavirus
  REGION 1..11: note = Table B: HLA-DRB1*14:01L
  source 1..11: note = Severe acute respiratory syndrome coronavirus 2
DQLTPTWRVYS

SEQ ID NO: 21733 - protein, 11 aa, Severe acute respiratory syndrome-related coronavirus
  REGION 1..11: note = Table B: HLA-DRB1*14:01L HLA-DRB1*14:17L
  source 1..11: note = Severe acute respiratory syndrome coronavirus 2
AQVKQIYKTPP

SEQ ID NO: 21734 - protein, 12 aa, Severe acute respiratory syndrome-related coronavirus
  REGION 1..12: note = Table B: HLA-DRB1*14:01L HLA-DRB1*04:08L
  source 1..12: note = Severe acute respiratory syndrome coronavirus 2
IYKTPPIKDFGG

SEQ ID NO: 21735 - protein, 12 aa, Severe acute respiratory syndrome-related coronavirus
  REGION 1..12: note = Table B: HLA-DRB1*14:01L HLA-DRB1*12:01L HLA-DRB1*16:01L HLA-DRB1*15:03L
  source 1..12: note = Severe acute respiratory syndrome coronavirus 2
TPPIKDFGGFNF

SEQ ID NO: 21736 - protein, 11 aa, Severe acute respiratory syndrome-related coronavirus
  REGION 1..11: note = Table B: HLA-DRB1*14:01L HLA-DRB4*01:01L HLA-DRB1*10:01L
  source 1..11: note = Severe acute respiratory syndrome coronavirus 2
SFIEDLLFNKV

SEQ ID NO: 21737 - protein, 12 aa, Severe acute respiratory syndrome-related coronavirus
  REGION 1..12: note = Table B: HLA-DRB1*14:01L
  source 1..12: note = Severe acute respiratory syndrome coronavirus 2
IEDLLFNKVTLA

SEQ ID NO: 21738 - protein, 12 aa, Severe acute respiratory syndrome-related coronavirus
  REGION 1..12: note = Table B: HLA-DRB1*14:01L HLA-DRB1*15:03L
  source 1..12: note = Severe acute respiratory syndrome coronavirus 2
EDLLFNKVTLAD

SEQ ID NO: 21739 - protein, 12 aa, Severe acute respiratory syndrome-related coronavirus
  REGION 1..12: note = Table B: HLA-DRB1*14:01L HLA-DRB1*08:01L
  source 1..12: note = Severe acute respiratory syndrome coronavirus 2
ARDLICAQKFNG

SEQ ID NO: 21740 - protein, 14 aa, Severe acute respiratory syndrome-related coronavirus
  REGION 1..14: note = Table B: HLA-DRB1*14:01L
  source 1..14: note = Severe acute respiratory syndrome coronavirus 2
EMIAQYTSALLAGT

SEQ ID NO: 21741 - protein, 12 aa, Severe acute respiratory syndrome-related coronavirus
  REGION 1..12: note = Table B: HLA-DRB1*14:01L
  source 1..12: note = Severe acute respiratory syndrome coronavirus 2
QIPFAMQMAYRF

SEQ ID NO: 21742 - protein, 15 aa, Severe acute respiratory syndrome-related coronavirus
  REGION 1..15: note = Table B: HLA-DRB1*14:01L HLA-DRB1*14:02L
  source 1..15: note = Severe acute respiratory syndrome coronavirus 2
SSTASALGKLQDVVN

SEQ ID NO: 21743 - protein, 11 aa, Severe acute respiratory syndrome-related coronavirus
  REGION 1..11: note = Table B: HLA-DRB1*14:01L
  source 1..11: note = Severe acute respiratory syndrome coronavirus 2
ALNTLVKQLSS

SEQ ID NO: 21744 - protein, 11 aa, Severe acute respiratory syndrome-related coronavirus
  REGION 1..11: note = Table B: HLA-DRB1*14:01L
  source 1..11: note = Severe acute respiratory syndrome coronavirus 2
LNTLVKQLSSN

SEQ ID NO: 21745 - protein, 13 aa, Severe acute respiratory syndrome-related coronavirus
  REGION 1..13: note = Table B: HLA-DRB1*14:01L HLA-DRB1*08:01L
  source 1..13: note = Severe acute respiratory syndrome coronavirus 2
LNDILSRLDKVEA

SEQ ID NO: 21746 - protein, 12 aa, Severe acute respiratory syndrome-related coronavirus
  REGION 1..12: note = Table B: HLA-DRB1*14:01L HLA-DPA1*02:01-B1*13:01L HLA-DRB1*04:08L
  source 1..12: note = Severe acute respiratory syndrome coronavirus 2
LQTYVTQQLIRA

SEQ ID NO: 21747 - protein, 13 aa, Severe acute respiratory syndrome-related coronavirus
  REGION 1..13: note = Table B: HLA-DRB1*14:01L HLA-DRB1*12:01L HLA-DRB1*14:17L HLA-DRB1*16:01L
  source 1..13: note = Severe acute respiratory syndrome coronavirus 2
VTQQLIRAAEIRA

SEQ ID NO: 21748 - protein, 14 aa, Severe acute respiratory syndrome-related coronavirus
  REGION 1..14: note = Table B: HLA-DRB1*14:01L HLA-DRB1*12:01L HLA-DRB1*15:03L
  source 1..14: note = Severe acute respiratory syndrome coronavirus 2
APHGVVFLHVTYVP

SEQ ID NO: 21749 - protein, 12 aa, Severe acute respiratory syndrome-related coronavirus
  REGION 1..12: note = Table B: HLA-DRB1*14:01L HLA-DPA1*02:01-B1*13:01L
  source 1..12: note = Severe acute respiratory syndrome coronavirus 2
LHVTYVPAQEKN

SEQ ID NO: 21750 - protein, 11 aa, Severe acute respiratory syndrome-related coronavirus
  REGION 1..11: note = Table B: HLA-DRB1*14:01L
  source 1..11: note = Severe acute respiratory syndrome coronavirus 2
VTYVPAQEKNF

SEQ ID NO: 21751 - protein, 12 aa, Severe acute respiratory syndrome-related coronavirus
  REGION 1..12: note = Table B: HLA-DRB1*14:01L
  source 1..12: note = Severe acute respiratory syndrome coronavirus 2
VFVSNGTHWFVT

SEQ ID NO: 21752 - protein, 16 aa, Severe acute respiratory syndrome-related coronavirus
  REGION 1..16: note = Table B: HLA-DRB1*14:01L HLA-DRB1*11:02L HLA-DRB1*14:02L HLA-DRB4*01:01L HLA-DRB1*09:01L HLA-DRB3*01:01L HLA-DRB1*07:01L
  source 1..16: note = Severe acute respiratory syndrome coronavirus 2
VTQRNFYEPQIITTDN

SEQ ID NO: 21753 - protein, 13 aa, Severe acute respiratory syndrome-related coronavirus
  REGION 1..13: note = Table B: HLA-DRB1*14:01L HLA-DRB1*15:03L
  source 1..13: note = Severe acute respiratory syndrome coronavirus 2
TIGTVTLKQGEIK

SEQ ID NO: 21754 - protein, 17 aa, Severe acute respiratory syndrome-related coronavirus
  REGION 1..17: note = Table B: HLA-DRB1*14:01L
  source 1..17: note = Severe acute respiratory syndrome coronavirus 2
IGTVTLKQGEIKDATPS

SEQ ID NO: 21755 - protein, 10 aa, Severe acute respiratory syndrome-related coronavirus
  REGION 1..10: note = Table B: HLA-DRB1*14:01L HLA-DRB1*08:01L
  source 1..10: note = Severe acute respiratory syndrome coronavirus 2
KIITLKKRWQ

SEQ ID NO: 21756 - protein, 15 aa, Severe acute respiratory syndrome-related coronavirus
  REGION 1..15: note = Table B: HLA-DRB1*14:01L
  source 1..15: note = Severe acute respiratory syndrome coronavirus 2
GVVNPVMEPIYDEPT

SEQ ID NO: 21757 - protein, 11 aa, Severe acute respiratory syndrome-related coronavirus
  REGION 1..11: note = Table B: HLA-DRB1*14:01L HLA-DRB1*08:01L
  source 1..11: note = Severe acute respiratory syndrome coronavirus 2
FYVYSRVKNLN

SEQ ID NO: 21758 - protein, 12 aa, Severe acute respiratory syndrome-related coronavirus
  REGION 1..12: note = Table B: HLA-DRB1*14:01L
  source 1..12: note = Severe acute respiratory syndrome coronavirus 2
TITVEELKKLLE

SEQ ID NO: 21759 - protein, 12 aa, Severe acute respiratory syndrome-related coronavirus
  REGION 1..12: note = Table B: HLA-DRB1*14:01L HLA-DPA1*03:01-B1*105:01L
  source 1..12: note = Severe acute respiratory syndrome coronavirus 2
VEELKKLLEQWN

SEQ ID NO: 21760 - protein, 12 aa, Severe acute respiratory syndrome-related coronavirus
  REGION 1..12: note = Table B: HLA-DRB1*14:01L
  source 1..12: note = Severe acute respiratory syndrome coronavirus 2
RNRFLYIIKLIF

SEQ ID NO: 21761 - protein, 12 aa, Severe acute respiratory syndrome-related coronavirus
  REGION 1..12: note = Table B: HLA-DRB1*14:01L
  source 1..12: note = Severe acute respiratory syndrome coronavirus 2
LSYFIASFRLFA

SEQ ID NO: 21762 - protein, 11 aa, Severe acute respiratory syndrome-related coronavirus
  REGION 1..11: note = Table B: HLA-DRB1*14:01L HLA-DRB1*14:54L
  source 1..11: note = Severe acute respiratory syndrome coronavirus 2
TNILLNVPLHG

SEQ ID NO: 21763 - protein, 13 aa, Severe acute respiratory syndrome-related coronavirus
  REGION 1..13: note = Table B: HLA-DRB1*14:01L
  source 1..13: note = Severe acute respiratory syndrome coronavirus 2
IGAVILRGHLRIA

SEQ ID NO: 21764 - protein, 12 aa, Severe acute respiratory syndrome-related coronavirus
  REGION 1..12: note = Table B: HLA-DRB1*14:01L
  source 1..12: note = Severe acute respiratory syndrome coronavirus 2
DIKDLPKEITVA

SEQ ID NO: 21765 - protein, 15 aa, Severe acute respiratory syndrome-related coronavirus
  REGION 1..15: note = Table B: HLA-DRB1*14:01L HLA-DRB1*11:01L
  source 1..15: note = Severe acute respiratory syndrome coronavirus 2
TSRTLSYYKLGASQR

SEQ ID NO: 21766 - protein, 12 aa, Severe acute respiratory syndrome-related coronavirus
  REGION 1..12: note = Table B: HLA-DRB1*14:01L
  source 1..12: note = Severe acute respiratory syndrome coronavirus 2
DSGFAAYSRYRI

SEQ ID NO: 21767 - protein, 11 aa, Severe acute respiratory syndrome-related coronavirus
  REGION 1..11: note = Table B: HLA-DRB1*14:01L
  source 1..11: note = Severe acute respiratory syndrome coronavirus 2
GFAAYSRYRIG

SEQ ID NO: 21768 - protein, 10 aa, Severe acute respiratory syndrome-related coronavirus
  REGION 1..10: note = Table B: HLA-DRB1*14:01L HLA-DQA1*02:01-B1*03:03L HLA-DRB1*15:03L
  source 1..10: note = Severe acute respiratory syndrome coronavirus 2
LIIKNLSKSL

SEQ ID NO: 21769 - protein, 10 aa, Severe acute respiratory syndrome-related coronavirus
  REGION 1..10: note = Table B: HLA-DRB1*14:01L
  source 1..10: note = Severe acute respiratory syndrome coronavirus 2
IIKNLSKSLT

SEQ ID NO: 21770 - protein, 14 aa, Severe acute respiratory syndrome-related coronavirus
  REGION 1..14: note = Table B: HLA-DRB1*14:01L HLA-DRB1*08:01L
  source 1..14: note = Severe acute respiratory syndrome coronavirus 2
VKHVYQLRARSVSP

SEQ ID NO: 21771 - protein, 12 aa, Severe acute respiratory syndrome-related coronavirus
  REGION 1..12: note = Table B: HLA-DRB1*14:01L HLA-DRB1*15:03L
  source 1..12: note = Severe acute respiratory syndrome coronavirus 2
LPFTINCQEPKL

SEQ ID NO: 21772 - protein, 13 aa, Severe acute respiratory syndrome-related coronavirus
  REGION 1..13: note = Table B: HLA-DRB1*14:01L
  source 1..13: note = Severe acute respiratory syndrome coronavirus 2
GVPINTNSSPDDQ

SEQ ID NO: 21773 - protein, 13 aa, Severe acute respiratory syndrome-related coronavirus
  REGION 1..13: note = Table B: HLA-DRB1*14:01L HLA-DRB1*11:04L HLA-DRB1*11:01L HLA-DRB1*12:01L
  source 1..13: note = Severe acute respiratory syndrome coronavirus 2
IGYYRRATRRIRG

SEQ ID NO: 21774 - protein, 15 aa, Severe acute respiratory syndrome-related coronavirus
  REGION 1..15: note = Table B: HLA-DRB1*14:01L HLA-DRB1*11:04L
  source 1..15: note = Severe acute respiratory syndrome coronavirus 2
GYYRRATRRIRGGDG

SEQ ID NO: 21775 - protein, 11 aa, Severe acute respiratory syndrome-related coronavirus
  REGION 1..11: note = Table B: HLA-DRB1*14:01L
  source 1..11: note = Severe acute respiratory syndrome coronavirus 2
SAFFGMSRIGM

SEQ ID NO: 21776 - protein, 15 aa, Severe acute respiratory syndrome-related coronavirus
  REGION 1..15: note = Table B: HLA-DRB1*14:01L HLA-DRB1*11:04L HLA-DRB3*01:01L
  source 1..15: note = Severe acute respiratory syndrome coronavirus 2
DKDPNFKDQVILLNK

SEQ ID NO: 21777 - protein, 12 aa, Severe acute respiratory syndrome-related coronavirus
  REGION 1..12: note = Table B: HLA-DRB1*14:01L
  source 1..12: note = Severe acute respiratory syndrome coronavirus 2
ILLNKHIDAYKT

SEQ ID NO: 21778 - protein, 18 aa, Severe acute respiratory syndrome-related coronavirus
  REGION 1..18: note = Table B: HLA-DRB1*11:02L HLA-DQA1*05:05-B1*03:19L HLA-DPA1*01:03-B1*104:01L
  source 1..18: note = Severe acute respiratory syndrome coronavirus 2
LPQLEQPYVFIKRSDART

SEQ ID NO: 21779 - protein, 16 aa, Severe acute respiratory syndrome-related coronavirus
  REGION 1..16: note = Table B: HLA-DRB1*11:02L HLA-DQA1*05:05-B1*03:19L HLA-DPA1*02:01-B1*13:01L HLA-DQA1*05:05-B1*03:01L
  source 1..16: note = Severe acute respiratory syndrome coronavirus 2
EQPYVFIKRSDARTAP

SEQ ID NO: 21780 - protein, 17 aa, Severe acute respiratory syndrome-related coronavirus
  REGION 1..17: note = Table B: HLA-DRB1*11:02L
  source 1..17: note = Severe acute respiratory syndrome coronavirus 2
GGAYTRYVDNNFCGPDG

SEQ ID NO: 21781 - protein, 14 aa, Severe acute respiratory syndrome-related coronavirus
  REGION 1..14: note = Table B: HLA-DRB1*11:02L HLA-DRB4*01:01L HLA-DPA1*01:03-B1*02:01L HLA-DRB1*08:02L
  source 1..14: note = Severe acute respiratory syndrome coronavirus 2
SEKSYELQTPFEIK

SEQ ID NO: 21782 - protein, 16 aa, Severe acute respiratory syndrome-related coronavirus
  REGION 1..16: note = Table B: HLA-DRB1*11:02L HLA-DRB1*08:02L
  source 1..16: note = Severe acute respiratory syndrome coronavirus 2
VFPLNSIIKTIQPRVE

SEQ ID NO: 21783 - protein, 11 aa, Severe acute respiratory syndrome-related coronavirus
  REGION 1..11: note = Table B: HLA-DRB1*11:02L
  source 1..11: note = Severe acute respiratory syndrome coronavirus 2
GYLPQNAVVKI

SEQ ID NO: 21784 - protein, 14 aa, Severe acute respiratory syndrome-related coronavirus
  REGION 1..14: note = Table B: HLA-DRB1*11:02L HLA-DRB1*14:02L HLA-DQA1*05:05-B1*03:19L HLA-DRB1*08:02L
  source 1..14: note = Severe acute respiratory syndrome coronavirus 2
NLLEILQKEKVNIN

SEQ ID NO: 21785 - protein, 14 aa, Severe acute respiratory syndrome-related coronavirus
  REGION 1..14: note = Table B: HLA-DRB1*11:02L HLA-DPA1*01:03-B1*104:01L
  source 1..14: note = Severe acute respiratory syndrome coronavirus 2
IVGDFKLNEEIAII

SEQ ID NO: 21786 - protein, 15 aa, Severe acute respiratory syndrome-related coronavirus
  REGION 1..15: note = Table B: HLA-DRB1*11:02L HLA-DRB1*14:02L HLA-DRB1*08:02L
  source 1..15: note = Severe acute respiratory syndrome coronavirus 2
VKGLDYKAFKQIVES

SEQ ID NO: 21787 - protein, 11 aa, Severe acute respiratory syndrome-related coronavirus
  REGION 1..11: note = Table B: HLA-DRB1*11:02L
  source 1..11: note = Severe acute respiratory syndrome coronavirus 2
GEQKSILSPLY

SEQ ID NO: 21788 - protein, 15 aa, Severe acute respiratory syndrome-related coronavirus
  REGION 1..15: note = Table B: HLA-DRB1*11:02L HLA-DRB1*08:02L
  source 1..15: note = Severe acute respiratory syndrome coronavirus 2
LTNIFGTVYEKLKPV

SEQ ID NO: 21789 - protein, 15 aa, Severe acute respiratory syndrome-related coronavirus
  REGION 1..15: note = Table B: HLA-DRB1*11:02L HLA-DRB1*11:04L HLA-DRB3*01:01L
  source 1..15: note = Severe acute respiratory syndrome coronavirus 2
GTVYEKLKPVLDWLE

SEQ ID NO: 21790 - protein, 16 aa, Severe acute respiratory syndrome-related coronavirus
  REGION 1..16: note = Table B: HLA-DRB1*11:02L
  source 1..16: note = Severe acute respiratory syndrome coronavirus 2
IKESVQTFFKLVNKFL

SEQ ID NO: 21791 - protein, 15 aa, Severe acute respiratory syndrome-related coronavirus
  REGION 1..15: note = Table B: HLA-DRB1*11:02L HLA-DPA1*01:03-B1*104:01L HLA-DRB1*08:02L
  source 1..15: note = Severe acute respiratory syndrome coronavirus 2
SIIIGGAKLKALNLG

SEQ ID NO: 21792 - protein, 16 aa, Severe acute respiratory syndrome-related coronavirus
  REGION 1..16: note = Table B: HLA-DRB1*11:02L
  source 1..16: note = Severe acute respiratory syndrome coronavirus 2
TNNTFTLKGGAPTKVT

SEQ ID NO: 21793 - protein, 11 aa, Severe acute respiratory syndrome-related coronavirus
  REGION 1..11: note = Table B: HLA-DRB1*11:02L HLA-DQA1*01-B1*05L
  source 1..11: note = Severe acute respiratory syndrome coronavirus 2
GDDTVIEVQGY

SEQ ID NO: 21794 - protein, 16 aa, Severe acute respiratory syndrome-related coronavirus
  REGION 1..16: note = Table B: HLA-DRB1*11:02L HLA-DRB1*11:03L HLA-DRB3*01:01L
  source 1..16: note = Severe acute respiratory syndrome coronavirus 2
TEDDYQGKPLEFGATS

SEQ ID NO: 21795 - protein, 17 aa, Severe acute respiratory syndrome-related coronavirus
  REGION 1..17: note = Table B: HLA-DRB1*11:02L HLA-DPA1*01:03-B1*04:01L
  source 1..17: note = Severe acute respiratory syndrome coronavirus 2
KPLEFGATSAALQPEEE

SEQ ID NO: 21796 - protein, 14 aa, Severe acute respiratory syndrome-related coronavirus
  REGION 1..14: note = Table B: HLA-DRB1*11:02L HLA-DRB4*02:01NL HLA-DPA1*01:03-B1*02:01L HLA-DPA1*01:03-B1*104:01L
  source 1..14: note = Severe acute respiratory syndrome coronavirus 2
VAGALNKATNNAMQ

SEQ ID NO: 21797 - protein, 14 aa, Severe acute respiratory syndrome-related coronavirus
  REGION 1..14: note = Table B: HLA-DRB1*11:02L HLA-DRB1*11:03L HLA-DPA1*01:03-B1*02:01L
  source 1..14: note = Severe acute respiratory syndrome coronavirus 2
LAVFDKNLYDKLVS

SEQ ID NO: 21798 - protein, 14 aa, Severe acute respiratory syndrome-related coronavirus
  REGION 1..14: note = Table B: HLA-DRB1*11:02L HLA-DRB1*13:01L HLA-DRB1*08:03L
  source 1..14: note = Severe acute respiratory syndrome coronavirus 2
QKIAEIPKEEVKPF

SEQ ID NO: 21799 - protein, 18 aa, Severe acute respiratory syndrome-related coronavirus
  REGION 1..18: note = Table B: HLA-DRB1*11:02L HLA-DRB4*01:01L HLA-DPA1*01:03-B1*04:01L
  source 1..18: note = Severe acute respiratory syndrome coronavirus 2
IPKEEVKPFITESKPSVE

SEQ ID NO: 21800 - protein, 19 aa, Severe acute respiratory syndrome-related coronavirus
  REGION 1..19: note = Table B: HLA-DRB1*11:02L
  source 1..19: note = Severe acute respiratory syndrome coronavirus 2
HPDSATLVSDIDITFLKKD

SEQ ID NO: 21801 - protein, 20 aa, Severe acute respiratory syndrome-related coronavirus
  REGION 1..20: note = Table B: HLA-DRB1*11:02L
  source 1..20: note = Severe acute respiratory syndrome coronavirus 2
PDSATLVSDIDITFLKKDAP

SEQ ID NO: 21802 - protein, 18 aa, Severe acute respiratory syndrome-related coronavirus
  REGION 1..18: note = Table B: HLA-DRB1*11:02L
  source 1..18: note = Severe acute respiratory syndrome coronavirus 2
YPGQGLNGYTVEEAKTVL

SEQ ID NO: 21803 - protein, 14 aa, Severe acute respiratory syndrome-related coronavirus
  REGION 1..14: note = Table B: HLA-DRB1*11:02L HLA-DRB4*01:01L HLA-DPA1*01:03-B1*04:01L HLA-DPA1*01:03-B1*04:02L HLA-DPA1*02:01-B1*13:01L
  source 1..14: note = Severe acute respiratory syndrome coronavirus 2
ILPSIISNEKQEIL

SEQ ID NO: 21804 - protein, 15 aa, Severe acute respiratory syndrome-related coronavirus
  REGION 1..15: note = Table B: HLA-DRB1*11:02L HLA-DQA1*05:05-B1*03:116L HLA-DRB1*08:02L
  source 1..15: note = Severe acute respiratory syndrome coronavirus 2
EKQEILGTVSWNLRE

SEQ ID NO: 21805 - protein, 14 aa, Severe acute respiratory syndrome-related coronavirus
  REGION 1..14: note = Table B: HLA-DRB1*11:02L HLA-DRB1*08:02L
  source 1..14: note = Severe acute respiratory syndrome coronavirus 2
YFYTSKTTVASLIN

SEQ ID NO: 21806 - protein, 14 aa, Severe acute respiratory syndrome-related coronavirus
  REGION 1..14: note = Table B: HLA-DRB1*11:02L
  source 1..14: note = Severe acute respiratory syndrome coronavirus 2
SVYYTSNPTTFHLD

SEQ ID NO: 21807 - protein, 15 aa, Severe acute respiratory syndrome-related coronavirus
  REGION 1..15: note = Table B: HLA-DRB1*11:02L HLA-DRB1*14:02L HLA-DRB4*01:01L HLA-DPA1*01:03-B1*04:01L HLA-DRB1*09:01L HLA-DRB1*08:02L
  source 1..15: note = Severe acute respiratory syndrome coronavirus 2
LREVRTIKVFTTVDN

SEQ ID NO: 21808 - protein, 15 aa, Severe acute respiratory syndrome-related coronavirus
  REGION 1..15: note = Table B: HLA-DRB1*11:02L HLA-DRB4*01:01L HLA-DRB1*08:02L HLA-DRB1*15:01L
  source 1..15: note = Severe acute respiratory syndrome coronavirus 2
IKVFTTVDNINLHTQ

SEQ ID NO: 21809 - protein, 18 aa, Severe acute respiratory syndrome-related coronavirus
  REGION 1..18: note = Table B: HLA-DRB1*11:02L HLA-DPA1*01:03-B1*04:02L HLA-DRB1*08:02L
  source 1..18: note = Severe acute respiratory syndrome coronavirus 2
DGADVTKIKPHNSHEGKT

SEQ ID NO: 21810 - protein, 11 aa, Severe acute respiratory syndrome-related coronavirus
  REGION 1..11: note = Table B: HLA-DRB1*11:02L HLA-DRB1*12:01L
  source 1..11: note = Severe acute respiratory syndrome coronavirus 2
DDTLRVEAFEY

SEQ ID NO: 21811 - protein, 17 aa, Severe acute respiratory syndrome-related coronavirus
  REGION 1..17: note = Table B: HLA-DRB1*11:02L HLA-DRB1*11:03L
  source 1..17: note = Severe acute respiratory syndrome coronavirus 2
DTLRVEAFEYYHTTDPS

SEQ ID NO: 21812 - protein, 14 aa, Severe acute respiratory syndrome-related coronavirus
  REGION 1..14: note = Table B: HLA-DRB1*11:02L HLA-DRB1*11:03L HLA-DQA1*05:05-B1*03:116L HLA-DQA1*05:05-B1*03:01L
  source 1..14: note = Severe acute respiratory syndrome coronavirus 2
TLSYEQFKKGVQIP

SEQ ID NO: 21813 - protein, 18 aa, Severe acute respiratory syndrome-related coronavirus
  REGION 1..18: note = Table B: HLA-DRB1*11:02L
  source 1..18: note = Severe acute respiratory syndrome coronavirus 2
APPAQYELKHGTFTCASE

SEQ ID NO: 21814 - protein, 18 aa, Severe acute respiratory syndrome-related coronavirus
  REGION 1..18: note = Table B: HLA-DRB1*11:02L HLA-DPA1*01:03-B1*104:01L
  source 1..18: note = Severe acute respiratory syndrome coronavirus 2
YTGNYQCGHYKHITSKET

SEQ ID NO: 21815 - protein, 11 aa, Severe acute respiratory syndrome-related coronavirus
  REGION 1..11: note = Table B: HLA-DRB1*11:02L HLA-DRB1*10:01L HLA-DRB1*08:02L
  source 1..11: note = Severe acute respiratory syndrome coronavirus 2
EYKGPITDVFY

SEQ ID NO: 21816 - protein, 15 aa, Severe acute respiratory syndrome-related coronavirus
  REGION 1..15: note = Table B: HLA-DRB1*11:02L HLA-DRB5*01:01L HLA-DRB4*02:01NL HLA-DRB1*13:01L HLA-DRB1*15:01L
  source 1..15: note = Severe acute respiratory syndrome coronavirus 2
DNSYFTEQPIDLVPN

SEQ ID NO: 21817 - protein, 13 aa, Severe acute respiratory syndrome-related coronavirus
  REGION 1..13: note = Table B: HLA-DRB1*11:02L HLA-DRB4*02:01NL HLA-DPA1*01:03-B1*04:01L HLA-DPA1*01:03-B1*02:01L HLA-DRB1*08:02L
  source 1..13: note = Severe acute respiratory syndrome coronavirus 2
QPIDLVPNQPYPN

SEQ ID NO: 21818 - protein, 14 aa, Severe acute respiratory syndrome-related coronavirus
  REGION 1..14: note = Table B: HLA-DRB1*11:02L HLA-DRB1*08:02L
  source 1..14: note = Severe acute respiratory syndrome coronavirus 2
PIDLVPNQPYPNAS

SEQ ID NO: 21819 - protein, 13 aa, Severe acute respiratory syndrome-related coronavirus
  REGION 1..13: note = Table B: HLA-DRB1*11:02L HLA-DPA1*01:03-B1*104:01L
  source 1..13: note = Severe acute respiratory syndrome coronavirus 2
DLVPNQPYPNASF

SEQ ID NO: 21820 - protein, 19 aa, Severe acute respiratory syndrome-related coronavirus
  REGION 1..19: note = Table B: HLA-DRB1*11:02L HLA-DQA1*05:05-B1*03:19L
  source 1..19: note = Severe acute respiratory syndrome coronavirus 2
KPASRELKVTFFPDLNGDV

SEQ ID NO: 21821 - protein, 15 aa, Severe acute respiratory syndrome-related coronavirus
  REGION 1..15: note = Table B: HLA-DRB1*11:02L HLA-DRB1*15:01L
  source 1..15: note = Severe acute respiratory syndrome coronavirus 2
ELKVTFFPDLNGDVV

SEQ ID NO: 21822 - protein, 16 aa, Severe acute respiratory syndrome-related coronavirus
  REGION 1..16: note = Table B: HLA-DRB1*11:02L HLA-DPA1*01:03-B1*04:02L
  source 1..16: note = Severe acute respiratory syndrome coronavirus 2
IDYKHYTPSFKKGAKL

SEQ ID NO: 21823 - protein, 16 aa, Severe acute respiratory syndrome-related coronavirus
  REGION 1..16: note = Table B: HLA-DRB1*11:02L HLA-DRB1*14:02L HLA-DPA1*01:03-B1*04:02L HLA-DPA1*02:01-B1*13:01L HLA-DPA1*03:01-B1*105:01L HLA-DQA1*01:03-B1*06:01L HLA-DRB1*08:02L
  source 1..16: note = Severe acute respiratory syndrome coronavirus 2
TPSFKKGAKLLHKPIV

SEQ ID NO: 21824 - protein, 14 aa, Severe acute respiratory syndrome-related coronavirus
  REGION 1..14: note = Table B: HLA-DRB1*11:02L
  source 1..14: note = Severe acute respiratory syndrome coronavirus 2
LNKVVSTTTNIVTR

SEQ ID NO: 21825 - protein, 16 aa, Severe acute respiratory syndrome-related coronavirus
  REGION 1..16: note = Table B: HLA-DRB1*11:02L HLA-DPA1*01:03-B1*104:01L
  source 1..16: note = Severe acute respiratory syndrome coronavirus 2
MPTTIAKNTVKSVGKF

SEQ ID NO: 21826 - protein, 16 aa, Severe acute respiratory syndrome-related coronavirus
  REGION 1..16: note = Table B: HLA-DRB1*11:02L HLA-DRB1*08:02L
  source 1..16: note = Severe acute respiratory syndrome coronavirus 2
ASFNYLKSPNFSKLIN

SEQ ID NO: 21827 - protein, 13 aa, Severe acute respiratory syndrome-related coronavirus
  REGION 1..13: note = Table B: HLA-DRB1*11:02L
  source 1..13: note = Severe acute respiratory syndrome coronavirus 2
GSTFISDEVARDL

SEQ ID NO: 21828 - protein, 14 aa, Severe acute respiratory syndrome-related coronavirus
  REGION 1..14: note = Table B: HLA-DRB1*11:02L HLA-DPA1*01:03-B1*02:01L
  source 1..14: note = Severe acute respiratory syndrome coronavirus 2
TFISDEVARDLSLQ

SEQ ID NO: 21829 - protein, 16 aa, Severe acute respiratory syndrome-related coronavirus
  REGION 1..16: note = Table B: HLA-DRB1*11:02L HLA-DRB1*14:02L HLA-DPA1*01:03-B1*04:02L
  source 1..16: note = Severe acute respiratory syndrome coronavirus 2
RDLSLQFKRPINPTDQ

SEQ ID NO: 21830 - protein, 16 aa, Severe acute respiratory syndrome-related coronavirus
  REGION 1..16: note = Table B: HLA-DRB1*11:02L HLA-DPA1*01:03-B1*04:01L HLA-DQA1*05:05-B1*03:116L HLA-DPA1*01:03-B1*02:01L HLA-DRB1*08:02L
  source 1..16: note = Severe acute respiratory syndrome coronavirus 2
SSYIVDSVTVKNGSIH

SEQ ID NO: 21831 - protein, 15 aa, Severe acute respiratory syndrome-related coronavirus
  REGION 1..15: note = Table B: HLA-DRB1*11:02L HLA-DRB1*13:01L HLA-DRB1*10:01L
  source 1..15: note = Severe acute respiratory syndrome coronavirus 2
NGSIHLYFDKAGQKT

SEQ ID NO: 21832 - protein, 18 aa, Severe acute respiratory syndrome-related coronavirus
  REGION 1..18: note = Table B: HLA-DRB1*11:02L
  source 1..18: note = Severe acute respiratory syndrome coronavirus 2
LDQALVSDVGDSAEVAVK

SEQ ID NO: 21833 - protein, 11 aa, Severe acute respiratory syndrome-related coronavirus
  REGION 1..11: note = Table B: HLA-DRB1*11:02L HLA-DRB1*08:02L
  source 1..11: note = Severe acute respiratory syndrome coronavirus 2
AEVAVKMFDAY

SEQ ID NO: 21834 - protein, 12 aa, Severe acute respiratory syndrome-related coronavirus
  REGION 1..12: note = Table B: HLA-DRB1*11:02L HLA-DRB1*09:01L HLA-DRB3*01:01L HLA-DPA1*01:03-B1*02:01L HLA-DPA1*01:03-B1*104:01L HLA-DRB1*08:02L HLA-DRB1*08:03L
  source 1..12: note = Severe acute respiratory syndrome coronavirus 2
TFISAARQGFVD

SEQ ID NO: 21835 - protein, 15 aa, Severe acute respiratory syndrome-related coronavirus
  REGION 1..15: note = Table B: HLA-DRB1*11:02L HLA-DRB1*11:03L HLA-DQA1*05:05-B1*03:19L HLA-DPA1*01:03-B1*02:01L HLA-DRB1*08:02L
  source 1..15: note = Severe acute respiratory syndrome coronavirus 2
TKDVVECLKLSHQSD

SEQ ID NO: 21836 - protein, 15 aa, Severe acute respiratory syndrome-related coronavirus
  REGION 1..15: note = Table B: HLA-DRB1*11:02L HLA-DRB1*11:03L HLA-DRB1*10:01L HLA-DRB1*08:03L
  source 1..15: note = Severe acute respiratory syndrome coronavirus 2
ALIWNVKDFMSLSEQ

SEQ ID NO: 21837 - protein, 17 aa, Severe acute respiratory syndrome-related coronavirus
  REGION 1..17: note = Table B: HLA-DRB1*11:02L
  source 1..17: note = Severe acute respiratory syndrome coronavirus 2
LSEQLRKQIRSAAKKNN

SEQ ID NO: 21838 - protein, 15 aa, Severe acute respiratory syndrome-related coronavirus
  REGION 1..15: note = Table B: HLA-DRB1*11:02L HLA-DRB1*08:03L
  source 1..15: note = Severe acute respiratory syndrome coronavirus 2
RKQIRSAAKKNNLPF

SEQ ID NO: 21839 - protein, 16 aa, Severe acute respiratory syndrome-related coronavirus
  REGION 1..16: note = Table B: HLA-DRB1*11:02L
  source 1..16: note = Severe acute respiratory syndrome coronavirus 2
VGNICYTPSKLIEYTD

SEQ ID NO: 21840 - protein, 16 aa, Severe acute respiratory syndrome-related coronavirus
  REGION 1..16: note = Table B: HLA-DRB1*11:02L
  source 1..16: note = Severe acute respiratory syndrome coronavirus 2
RWVLNNDYYRSLPGVF

SEQ ID NO: 21841 - protein, 16 aa, Severe acute respiratory syndrome-related coronavirus
  REGION 1..16: note = Table B: HLA-DRB1*11:02L HLA-DRB1*11:04L HLA-DRB1*09:01L
  source 1..16: note = Severe acute respiratory syndrome coronavirus 2
NNDYYRSLPGVFCGVD

SEQ ID NO: 21842 - protein, 15 aa, Severe acute respiratory syndrome-related coronavirus
  REGION 1..15: note = Table B: HLA-DRB1*11:02L HLA-DRB4*01:01L
  source 1..15: note = Severe acute respiratory syndrome coronavirus 2
TNMFTPLIQPIGALD

SEQ ID NO: 21843 - protein, 16 aa, Severe acute respiratory syndrome-related coronavirus
  REGION 1..16: note = Table B: HLA-DRB1*11:02L HLA-DRB1*14:02L
  source 1..16: note = Severe acute respiratory syndrome coronavirus 2
LAYYFMRFRRAFGEYS

SEQ ID NO: 21844 - protein, 13 aa, Severe acute respiratory syndrome-related coronavirus
  REGION 1..13: note = Table B: HLA-DRB1*11:02L
  source 1..13: note = Severe acute respiratory syndrome coronavirus 2
IAYIICISTKHFY

SEQ ID NO: 21845 - protein, 16 aa, Severe acute respiratory syndrome-related coronavirus
  REGION 1..16: note = Table B: HLA-DRB1*11:02L HLA-DQA1*05:05-B1*03:01L HLA-DRB1*10:01L
  source 1..16: note = Severe acute respiratory syndrome coronavirus 2
STKHFYWFFSNYLKRR

SEQ ID NO: 21846 - protein, 16 aa, Severe acute respiratory syndrome-related coronavirus
  REGION 1..16: note = Table B: HLA-DRB1*11:02L HLA-DRB1*14:02L HLA-DRB1*08:02L HLA-DRB1*08:03L
  source 1..16: note = Severe acute respiratory syndrome coronavirus 2
QSGFRKMAFPSGKVEG

SEQ ID NO: 21847 - protein, 16 aa, Severe acute respiratory syndrome-related coronavirus
  REGION 1..16: note = Table B: HLA-DRB1*11:02L HLA-DRB4*01:01L HLA-DQA1*01:03-B1*06:01L
  source 1..16: note = Severe acute respiratory syndrome coronavirus 2
LNGLWLDDVVYCPRHV

SEQ ID NO: 21848 - protein, 17 aa, Severe acute respiratory syndrome-related coronavirus
  REGION 1..17: note = Table B: HLA-DRB1*11:02L HLA-DRB1*14:02L HLA-DPA1*01:03-B1*104:01L HLA-DRB1*08:02L
  source 1..17: note = Severe acute respiratory syndrome coronavirus 2
NPNYEDLLIRKSNHNFL

SEQ ID NO: 21849 - protein, 15 aa, Severe acute respiratory syndrome-related coronavirus
  REGION 1..15: note = Table B: HLA-DRB1*11:02L
  source 1..15: note = Severe acute respiratory syndrome coronavirus 2
SNHNFLVQAGNVQLR

SEQ ID NO: 21850 - protein, 16 aa, Severe acute respiratory syndrome-related coronavirus
  REGION 1..16: note = Table B: HLA-DRB1*11:02L
  source 1..16: note = Severe acute respiratory syndrome coronavirus 2
HNFLVQAGNVQLRVIG

SEQ ID NO: 21851 - protein, 11 aa, Severe acute respiratory syndrome-related coronavirus
  REGION 1..11: note = Table B: HLA-DRB1*11:02L
  source 1..11: note = Severe acute respiratory syndrome coronavirus 2
VDTANPKTPKY

SEQ ID NO: 21852 - protein, 16 aa, Severe acute respiratory syndrome-related coronavirus
  REGION 1..16: note = Table B: HLA-DRB1*11:02L HLA-DRB4*01:01L HLA-DQA1*05:05-B1*03:116L HLA-DRB1*09:01L HLA-DRB1*10:01L HLA-DRB1*08:02L HLA-DRB1*08:03L
  source 1..16: note = Severe acute respiratory syndrome coronavirus 2
DRWFLNRFTTTLNDFN

SEQ ID NO: 21853 - protein, 15 aa, Severe acute respiratory syndrome-related coronavirus
  REGION 1..15: note = Table B: HLA-DRB1*11:02L HLA-DRB1*08:02L
  source 1..15: note = Severe acute respiratory syndrome coronavirus 2
EDEFTPFDVVRQCSG

SEQ ID NO: 21854 - protein, 14 aa, Severe acute respiratory syndrome-related coronavirus
  REGION 1..14: note = Table B: HLA-DRB1*11:02L HLA-DRB1*13:01L HLA-DPA1*02:01-B1*13:01L
  source 1..14: note = Severe acute respiratory syndrome coronavirus 2
AFAMMFVKHKHAFL

SEQ ID NO: 21855 - protein, 16 aa, Severe acute respiratory syndrome-related coronavirus
  REGION 1..16: note = Table B: HLA-DRB1*11:02L
  source 1..16: note = Severe acute respiratory syndrome coronavirus 2
LSVLQQLRVESSSKLW

SEQ ID NO: 21856 - protein, 14 aa, Severe acute respiratory syndrome-related coronavirus
  REGION 1..14: note = Table B: HLA-DRB1*11:02L HLA-DRB3*01:01L HLA-DPA1*01:03-B1*104:01L
  source 1..14: note = Severe acute respiratory syndrome coronavirus 2
LPSYAAFATAQEAY

SEQ ID NO: 21857 - protein, 15 aa, Severe acute respiratory syndrome-related coronavirus
  REGION 1..15: note = Table B: HLA-DRB1*11:02L HLA-DRB1*13:01L HLA-DRB1*08:02L
  source 1..15: note = Severe acute respiratory syndrome coronavirus 2
GDSEVVLKKLKKSLN

SEQ ID NO: 21858 - protein, 17 aa, Severe acute respiratory syndrome-related coronavirus
  REGION 1..17: note = Table B: HLA-DRB1*11:02L
  source 1..17: note = Severe acute respiratory syndrome coronavirus 2
VAKSEFDRDAAMQRKLE

SEQ ID NO: 21859 - protein, 15 aa, Severe acute respiratory syndrome-related coronavirus
  REGION 1..15: note = Table B: HLA-DRB1*11:02L HLA-DRB1*14:02L
  source 1..15: note = Severe acute respiratory syndrome coronavirus 2
TMLFTMLRKLDNDAL

SEQ ID NO: 21860 - protein, 15 aa, Severe acute respiratory syndrome-related coronavirus
  REGION 1..15: note = Table B: HLA-DRB1*11:02L HLA-DPA1*01:03-B1*02:01L
  source 1..15: note = Severe acute respiratory syndrome coronavirus 2
IQQVVDADSKIVQLS

SEQ ID NO: 21861 - protein, 16 aa, Severe acute respiratory syndrome-related coronavirus
  REGION 1..16: note = Table B: HLA-DRB1*11:02L HLA-DRB1*13:01L HLA-DPA1*01:03-B1*02:01L HLA-DRB1*08:02L
  source 1..16: note = Severe acute respiratory syndrome coronavirus 2
SKIVQLSEISMDNSPN

SEQ ID NO: 21862 - protein, 13 aa, Severe acute respiratory syndrome-related coronavirus
  REGION 1..13: note = Table B: HLA-DRB1*11:02L HLA-DRB1*04:10L HLA-DRB1*09:01L HLA-DPA1*03:01-B1*105:01L HLA-DRB1*08:03L
  source 1..13: note = Severe acute respiratory syndrome coronavirus 2
TALRANSAVKLQN

SEQ ID NO: 21863 - protein, 14 aa, Severe acute respiratory syndrome-related coronavirus
  REGION 1..14: note = Table B: HLA-DRB1*11:02L HLA-DPA1*01:03-B1*02:01L
  source 1..14: note = Severe acute respiratory syndrome coronavirus 2
NALAYYNTTKGGRF

SEQ ID NO: 21864 - protein, 13 aa, Severe acute respiratory syndrome-related coronavirus
  REGION 1..13: note = Table B: HLA-DRB1*11:02L HLA-DPA1*01:03-B1*02:01L HLA-DRB1*15:01L
  source 1..13: note = Severe acute respiratory syndrome coronavirus 2
LAYYNTTKGGRFV

SEQ ID NO: 21865 - protein, 16 aa, Severe acute respiratory syndrome-related coronavirus
  REGION 1..16: note = Table B: HLA-DRB1*11:02L
  source 1..16: note = Severe acute respiratory syndrome coronavirus 2
YLYFIKGLNNLNRGMV

SEQ ID NO: 21866 - protein, 16 aa, Severe acute respiratory syndrome-related coronavirus
  REGION 1..16: note = Table B: HLA-DRB1*11:02L HLA-DRB1*14:02L HLA-DPA1*01:03-B1*04:02L
  source 1..16: note = Severe acute respiratory syndrome coronavirus 2
IKGLNNLNRGMVLGSL

SEQ ID NO: 21867 - protein, 13 aa, Severe acute respiratory syndrome-related coronavirus
  REGION 1..13: note = Table B: HLA-DRB1*11:02L HLA-DQA1*05:05-B1*03:116L HLA-DPA1*01:03-B1*04:02L HLA-DRB3*01:01L HLA-DRB1*08:02L HLA-DRB1*15:03L
  source 1..13: note = Severe acute respiratory syndrome coronavirus 2
GSLAATVRLQAGN

SEQ ID NO: 21868 - protein, 12 aa, Severe acute respiratory syndrome-related coronavirus
  REGION 1..12: note = Table B: HLA-DRB1*11:02L HLA-DRB1*09:01L HLA-DRB1*07:01L
  source 1..12: note = Severe acute respiratory syndrome coronavirus 2
AFAVDAAKAYKD

SEQ ID NO: 21869 - protein, 13 aa, Severe acute respiratory syndrome-related coronavirus
  REGION 1..13: note = Table B: HLA-DRB1*11:02L HLA-DRB1*13:01L
  source 1..13: note = Severe acute respiratory syndrome coronavirus 2
YKDYLASGGQPIT

SEQ ID NO: 21870 - protein, 16 aa, Severe acute respiratory syndrome-related coronavirus
  REGION 1..16: note = Table B: HLA-DRB1*11:02L
  source 1..16: note = Severe acute respiratory syndrome coronavirus 2
TGQAITVTPEANMDQE

SEQ ID NO: 21871 - protein, 12 aa, Severe acute respiratory syndrome-related coronavirus
  REGION 1..12: note = Table B: HLA-DRB1*11:02L HLA-DQA1*01-B1*05L HLA-DPA1*01:03-B1*104:01L HLA-DRB1*16:01L
  source 1..12: note = Severe acute respiratory syndrome coronavirus 2
STDVVYRAFDIY

SEQ ID NO: 21872 - protein, 16 aa, Severe acute respiratory syndrome-related coronavirus
  REGION 1..16: note = Table B: HLA-DRB1*11:02L HLA-DRB4*01:01L HLA-DRB1*09:01L
  source 1..16: note = Severe acute respiratory syndrome coronavirus 2
DVVYRAFDIYNDKVAG

SEQ ID NO: 21873 - protein, 16 aa, Severe acute respiratory syndrome-related coronavirus
  REGION 1..16: note = Table B: HLA-DRB1*11:02L HLA-DRB1*14:02L
  source 1..16: note = Severe acute respiratory syndrome coronavirus 2
DDNLIDSYFVVKRHTF

SEQ ID NO: 21874 - protein, 16 aa, Severe acute respiratory syndrome-related coronavirus
  REGION 1..16: note = Table B: HLA-DRB1*11:02L HLA-DQA1*05:05-B1*03:19L HLA-DQA1*05:01-B1*02:01L HLA-DPA1*01:03-B1*104:01L
  source 1..16: note = Severe acute respiratory syndrome coronavirus 2
DNLIDSYFVVKRHTFS

SEQ ID NO: 21875 - protein, 13 aa, Severe acute respiratory syndrome-related coronavirus
  REGION 1..13: note = Table B: HLA-DRB1*11:02L HLA-DRB1*14:02L HLA-DQA1*05:05-B1*03:116L HLA-DRB1*08:02L
  source 1..13: note = Severe acute respiratory syndrome coronavirus 2
DSYFVVKRHTFSN

SEQ ID NO: 21876 - protein, 15 aa, Severe acute respiratory syndrome-related coronavirus
  REGION 1..15: note = Table B: HLA-DRB1*11:02L HLA-DRB1*11:01L HLA-DRB3*01:01L
  source 1..15: note = Severe acute respiratory syndrome coronavirus 2
RHTFSNYQHEETIYN

SEQ ID NO: 21877 - protein, 16 aa, Severe acute respiratory syndrome-related coronavirus
  REGION 1..16: note = Table B: HLA-DRB1*11:02L HLA-DPA1*01:03-B1*104:01L
  source 1..16: note = Severe acute respiratory syndrome coronavirus 2
TIYNLLKDCPAVAKHD

SEQ ID NO: 21878 - protein, 14 aa, Severe acute respiratory syndrome-related coronavirus
  REGION 1..14: note = Table B: HLA-DRB1*11:02L HLA-DPA1*02:01-B1*13:01L HLA-DRB1*08:02L HLA-DRB1*15:03L
  source 1..14: note = Severe acute respiratory syndrome coronavirus 2
MADLVYALRHFDEG

SEQ ID NO: 21879 - protein, 14 aa, Severe acute respiratory syndrome-related coronavirus
  REGION 1..14: note = Table B: HLA-DRB1*11:02L HLA-DRB1*14:02L HLA-DQA1*05:05-B1*03:19L HLA-DPA1*01:03-B1*04:02L HLA-DQA1*05:05-B1*03:01L HLA-DRB1*08:02L
  source 1..14: note = Severe acute respiratory syndrome coronavirus 2
ADLVYALRHFDEGN

SEQ ID NO: 21880 - protein, 12 aa, Severe acute respiratory syndrome-related coronavirus
  REGION 1..12: note = Table B: HLA-DRB1*11:02L HLA-DRB1*14:02L HLA-DQA1*05:05-B1*03:116L HLA-DPA1*01:03-B1*04:02L HLA-DRB1*12:01L
  source 1..12: note = Severe acute respiratory syndrome coronavirus 2
TLDNQDLNGNWY

SEQ ID NO: 21881 - protein, 16 aa, Severe acute respiratory syndrome-related coronavirus
  REGION 1..16: note = Table B: HLA-DRB1*11:02L
  source 1..16: note = Severe acute respiratory syndrome coronavirus 2
DFGDFIQTTPGSGVPV

SEQ ID NO: 21882 - protein, 16 aa, Severe acute respiratory syndrome-related coronavirus
  REGION 1..16: note = Table B: HLA-DRB1*11:02L HLA-DPA1*01:03-B1*04:01L
  source 1..16: note = Severe acute respiratory syndrome coronavirus 2
GDFIQTTPGSGVPVVD

SEQ ID NO: 21883 - protein, 18 aa, Severe acute respiratory syndrome-related coronavirus
  REGION 1..18: note = Table B: HLA-DRB1*11:02L
  source 1..18: note = Severe acute respiratory syndrome coronavirus 2
TKPYIKWDLLKYDFTEER

SEQ ID NO: 21884 - protein, 12 aa, Severe acute respiratory syndrome-related coronavirus
  REGION 1..12: note = Table B: HLA-DRB1*11:02L HLA-DRB1*12:01L HLA-DPA1*01:03-B1*104:01L
  source 1..12: note = Severe acute respiratory syndrome coronavirus 2
FTEERLKLFDRY

SEQ ID NO: 21885 - protein, 19 aa, Severe acute respiratory syndrome-related coronavirus
  REGION 1..19: note = Table B: HLA-DRB1*11:02L HLA-DRB1*14:02L HLA-DRB1*08:03L
  source 1..19: note = Severe acute respiratory syndrome coronavirus 2
PPTSFGPLVRKIFVDGVPF

SEQ ID NO: 21886 - protein, 15 aa, Severe acute respiratory syndrome-related coronavirus
  REGION 1..15: note = Table B: HLA-DRB1*11:02L HLA-DPA1*01:03-B1*02:01L
  source 1..15: note = Severe acute respiratory syndrome coronavirus 2
VPFVVSTGYHFRELG

SEQ ID NO: 21887 - protein, 15 aa, Severe acute respiratory syndrome-related coronavirus
  REGION 1..15: note = Table B: HLA-DRB1*11:02L HLA-DRB1*09:01L HLA-DPA1*01:03-B1*02:01L
  source 1..15: note = Severe acute respiratory syndrome coronavirus 2
YHFRELGVVHNQDVN

SEQ ID NO: 21888 - protein, 16 aa, Severe acute respiratory syndrome-related coronavirus
  REGION 1..16: note = Table B: HLA-DRB1*11:02L HLA-DRB1*11:03L HLA-DRB1*14:02L HLA-DRB1*07:01L HLA-DRB1*08:02L HLA-DRB1*08:03L
  source 1..16: note = Severe acute respiratory syndrome coronavirus 2
SRLSFKELLVYAADPA

SEQ ID NO: 21889 - protein, 14 aa, Severe acute respiratory syndrome-related coronavirus
  REGION 1..14: note = Table B: HLA-DRB1*11:02L HLA-DRB1*11:01L HLA-DPA1*01:03-B1*02:01L
  source 1..14: note = Severe acute respiratory syndrome coronavirus 2
FKELLVYAADPAMH

SEQ ID NO: 21890 - protein, 13 aa, Severe acute respiratory syndrome-related coronavirus
  REGION 1..13: note = Table B: HLA-DRB1*11:02L HLA-DPA1*01:03-B1*04:01L HLA-DPA1*01:03-B1*104:01L
  source 1..13: note = Severe acute respiratory syndrome coronavirus 2
LLVYAADPAMHAA

SEQ ID NO: 21891 - protein, 13 aa, Severe acute respiratory syndrome-related coronavirus
  REGION 1..13: note = Table B: HLA-DRB1*11:02L HLA-DRB4*02:01NL HLA-DPA1*01:03-B1*104:01L HLA-DRB1*08:02L HLA-DRB1*15:01L
  source 1..13: note = Severe acute respiratory syndrome coronavirus 2
LVYAADPAMHAAS

SEQ ID NO: 21892 - protein, 16 aa, Severe acute respiratory syndrome-related coronavirus
  REGION 1..16: note = Table B: HLA-DRB1*11:02L HLA-DRB1*08:03L
  source 1..16: note = Severe acute respiratory syndrome coronavirus 2
KDFYDFAVSKGFFKEG

SEQ ID NO: 21893 - protein, 15 aa, Severe acute respiratory syndrome-related coronavirus
  REGION 1..15: note = Table B: HLA-DRB1*11:02L HLA-DPA1*01:03-B1*04:02L HLA-DPA1*01:03-B1*104:01L HLA-DRB1*08:02L
  source 1..15: note = Severe acute respiratory syndrome coronavirus 2
LKHFFFAQDGNAAIS

SEQ ID NO: 21894 - protein, 14 aa, Severe acute respiratory syndrome-related coronavirus
  REGION 1..14: note = Table B: HLA-DRB1*11:02L HLA-DRB1*08:01L HLA-DPA1*01:03-B1*04:02L HLA-DPA1*02:01-B1*13:01L HLA-DPA1*01:03-B1*104:01L HLA-DRB1*07:01L HLA-DQA1*01:03-B1*06:01L HLA-DRB1*08:02L
  source 1..14: note = Severe acute respiratory syndrome coronavirus 2
HFFFAQDGNAAISD

SEQ ID NO: 21895 - protein, 13 aa, Severe acute respiratory syndrome-related coronavirus
  REGION 1..13: note = Table B: HLA-DRB1*11:02L HLA-DPA1*01:03-B1*04:01L HLA-DRB1*15:01L
  source 1..13: note = Severe acute respiratory syndrome coronavirus 2
NQVIVNNLDKSAG

SEQ ID NO: 21896 - protein, 14 aa, Severe acute respiratory syndrome-related coronavirus
  REGION 1..14: note = Table B: HLA-DRB1*11:02L
  source 1..14: note = Severe acute respiratory syndrome coronavirus 2
QVIVNNLDKSAGFP

SEQ ID NO: 21897 - protein, 15 aa, Severe acute respiratory syndrome-related coronavirus
  REGION 1..15: note = Table B: HLA-DRB1*11:02L HLA-DRB1*14:02L
  source 1..15: note = Severe acute respiratory syndrome coronavirus 2
GFPFNKWGKARLYYD

SEQ ID NO: 21898 - protein, 18 aa, Severe acute respiratory syndrome-related coronavirus
  REGION 1..18: note = Table B: HLA-DRB1*11:02L
  source 1..18: note = Severe acute respiratory syndrome coronavirus 2
GKARLYYDSMSYEDQDAL

SEQ ID NO: 21899 - protein, 12 aa, Severe acute respiratory syndrome-related coronavirus
  REGION 1..12: note = Table B: HLA-DRB1*11:02L HLA-DRB1*13:01L HLA-DQA1*05:05-B1*03:116L
  source 1..12: note = Severe acute respiratory syndrome coronavirus 2
LFAYTKRNVIPT

SEQ ID NO: 21900 - protein, 14 aa, Severe acute respiratory syndrome-related coronavirus
  REGION 1..14: note = Table B: HLA-DRB1*11:02L HLA-DPA1*01:03-B1*104:01L
  source 1..14: note = Severe acute respiratory syndrome coronavirus 2
FAYTKRNVIPTITQ

SEQ ID NO: 21901 - protein, 13 aa, Severe acute respiratory syndrome-related coronavirus
  REGION 1..13: note = Table B: HLA-DRB1*11:02L HLA-DRB1*14:02L HLA-DQA1*05:05-B1*03:19L HLA-DQA1*05:05-B1*03:116L HLA-DPA1*01:03-B1*04:02L HLA-DQA1*05:05-B1*03:01L HLA-DRB1*08:02L
  source 1..13: note = Severe acute respiratory syndrome coronavirus 2
LKYAISAKNRART

SEQ ID NO: 21902 - protein, 11 aa, Severe acute respiratory syndrome-related coronavirus
  REGION 1..11: note = Table B: HLA-DRB1*11:02L
  source 1..11: note = Severe acute respiratory syndrome coronavirus 2
ATVVIGTSKFY

SEQ ID NO: 21903 - protein, 14 aa, Severe acute respiratory syndrome-related coronavirus
  REGION 1..14: note = Table B: HLA-DRB1*11:02L HLA-DRB1*13:01L
  source 1..14: note = Severe acute respiratory syndrome coronavirus 2
VNALLSTDGNKIAD

SEQ ID NO: 21904 - protein, 14 aa, Severe acute respiratory syndrome-related coronavirus
  REGION 1..14: note = Table B: HLA-DRB1*11:02L HLA-DRB1*13:01L HLA-DRB4*01:01L HLA-DPA1*01:03-B1*04:02L HLA-DRB1*08:02L
  source 1..14: note = Severe acute respiratory syndrome coronavirus 2
NALLSTDGNKIADK

SEQ ID NO: 21905 - protein, 17 aa, Severe acute respiratory syndrome-related coronavirus
  REGION 1..17: note = Table B: HLA-DRB1*11:02L
  source 1..17: note = Severe acute respiratory syndrome coronavirus 2
NLQHRLYECLYRNRDVD

SEQ ID NO: 21906 - protein, 15 aa, Severe acute respiratory syndrome-related coronavirus
  REGION 1..15: note = Table B: HLA-DRB1*11:02L HLA-DRB1*14:02L HLA-DQA1*05:05-B1*03:116L HLA-DRB1*08:02L
  source 1..15: note = Severe acute respiratory syndrome coronavirus 2
HRLYECLYRNRDVDT

SEQ ID NO: 21907 - protein, 14 aa, Severe acute respiratory syndrome-related coronavirus
  REGION 1..14: note = Table B: HLA-DRB1*11:02L HLA-DQA1*05:05-B1*03:116L
  source 1..14: note = Severe acute respiratory syndrome coronavirus 2
VNEFYAYLRKHFSM

SEQ ID NO: 21908 - protein, 15 aa, Severe acute respiratory syndrome-related coronavirus
  REGION 1..15: note = Table B: HLA-DRB1*11:02L
  source 1..15: note = Severe acute respiratory syndrome coronavirus 2
IKNFKSVLYYQNNVF

SEQ ID NO: 21909 - protein, 14 aa, Severe acute respiratory syndrome-related coronavirus
  REGION 1..14: note = Table B: HLA-DRB1*11:02L HLA-DRB1*11:03L HLA-DRB1*14:02L HLA-DRB1*08:01L HLA-DRB4*01:01L HLA-DPA1*01:03-B1*04:01L HLA-DRB1*09:01L HLA-DPA1*01:03-B1*02:01L HLA-DPA1*01:03-B1*104:01L HLA-DRB1*07:01L HLA-DRB1*10:01L
  REGION 1..14: note = CONT. FROM ABOVE: HLA-DRB1*08:03L
  source 1..14: note = Severe acute respiratory syndrome coronavirus 2
SVLYYQNNVFMSEA

SEQ ID NO: 21910 - protein, 15 aa, Severe acute respiratory syndrome-related coronavirus
  REGION 1..15: note = Table B: HLA-DRB1*11:02L
  source 1..15: note = Severe acute respiratory syndrome coronavirus 2
DGTLMIERFVSLAID

SEQ ID NO: 21911 - protein, 18 aa, Severe acute respiratory syndrome-related coronavirus
  REGION 1..18: note = Table B: HLA-DRB1*11:02L HLA-DRB4*01:01L HLA-DRB1*09:01L
  source 1..18: note = Severe acute respiratory syndrome coronavirus 2
DAYPLTKHPNQEYADVFH

SEQ ID NO: 21912 - protein, 15 aa, Severe acute respiratory syndrome-related coronavirus
  REGION 1..15: note = Table B: HLA-DRB1*11:02L HLA-DRB1*14:02L
  source 1..15: note = Severe acute respiratory syndrome coronavirus 2
HLYLQYIRKLHDELT

SEQ ID NO: 21913 - protein, 11 aa, Severe acute respiratory syndrome-related coronavirus
  REGION 1..11: note = Table B: HLA-DRB1*11:02L HLA-DRB1*08:02L
  source 1..11: note = Severe acute respiratory syndrome coronavirus 2
DELTGHMLDMY

SEQ ID NO: 21914 - protein, 15 aa, Severe acute respiratory syndrome-related coronavirus
  REGION 1..15: note = Table B: HLA-DRB1*11:02L HLA-DQA1*05:05-B1*03:19L HLA-DPA1*01:03-B1*04:02L
  source 1..15: note = Severe acute respiratory syndrome coronavirus 2
GGMSYYCKSHKPPIS

SEQ ID NO: 21915 - protein, 15 aa, Severe acute respiratory syndrome-related coronavirus
  REGION 1..15: note = Table B: HLA-DRB1*11:02L HLA-DRB1*14:02L HLA-DQA1*05:05-B1*03:19L HLA-DPA1*02:01-B1*13:01L
  source 1..15: note = Severe acute respiratory syndrome coronavirus 2
GQVFGLYKNTCVGSD

SEQ ID NO: 21916 - protein, 14 aa, Severe acute respiratory syndrome-related coronavirus
  REGION 1..14: note = Table B: HLA-DRB1*11:02L
  source 1..14: note = Severe acute respiratory syndrome coronavirus 2
AGDYILANTCTERL

SEQ ID NO: 21917 - protein, 15 aa, Severe acute respiratory syndrome-related coronavirus
  REGION 1..15: note = Table B: HLA-DRB1*11:02L HLA-DRB1*11:03L HLA-DRB1*09:01L HLA-DPA1*01:03-B1*104:01L HLA-DRB1*08:03L
  source 1..15: note = Severe acute respiratory syndrome coronavirus 2
ERLKLFAAETLKATE

SEQ ID NO: 21918 - protein, 15 aa, Severe acute respiratory syndrome-related coronavirus
  REGION 1..15: note = Table B: HLA-DRB1*11:02L HLA-DQA1*05:05-B1*03:116L
  source 1..15: note = Severe acute respiratory syndrome coronavirus 2
RLKLFAAETLKATEE

SEQ ID NO: 21919 - protein, 14 aa, Severe acute respiratory syndrome-related coronavirus
  REGION 1..14: note = Table B: HLA-DRB1*11:02L
  source 1..14: note = Severe acute respiratory syndrome coronavirus 2
TGYRVTKNSKVQIG

SEQ ID NO: 21920 - protein, 15 aa, Severe acute respiratory syndrome-related coronavirus
  REGION 1..15: note = Table B: HLA-DRB1*11:02L
  source 1..15: note = Severe acute respiratory syndrome coronavirus 2
GYRVTKNSKVQIGEY

SEQ ID NO: 21921 - protein, 14 aa, Severe acute respiratory syndrome-related coronavirus
  REGION 1..14: note = Table B: HLA-DRB1*11:02L HLA-DRB4*02:01NL HLA-DRB1*13:01L HLA-DPA1*01:03-B1*02:01L HLA-DRB1*08:02L HLA-DRB1*15:01L
  source 1..14: note = Severe acute respiratory syndrome coronavirus 2
IGEYTFEKGDYGDA

SEQ ID NO: 21922 - protein, 14 aa, Severe acute respiratory syndrome-related coronavirus
  REGION 1..14: note = Table B: HLA-DRB1*11:02L HLA-DQA1*01:01-B1*05:01L HLA-DRB1*04:10L HLA-DPA1*01:03-B1*02:01L HLA-DRB1*08:03L
  source 1..14: note = Severe acute respiratory syndrome coronavirus 2
DAVVYRGTTTYKLN

SEQ ID NO: 21923 - protein, 16 aa, Severe acute respiratory syndrome-related coronavirus
  REGION 1..16: note = Table B: HLA-DRB1*11:02L
  source 1..16: note = Severe acute respiratory syndrome coronavirus 2
TSHTVMPLSAPTLVPQ

SEQ ID NO: 21924 - protein, 15 aa, Severe acute respiratory syndrome-related coronavirus
  REGION 1..15: note = Table B: HLA-DRB1*11:02L
  source 1..15: note = Severe acute respiratory syndrome coronavirus 2
RIVYTACSHAAVDAL

SEQ ID NO: 21925 - protein, 16 aa, Severe acute respiratory syndrome-related coronavirus
  REGION 1..16: note = Table B: HLA-DRB1*11:02L HLA-DQA1*05:05-B1*03:116L
  source 1..16: note = Severe acute respiratory syndrome coronavirus 2
AKHYVYIGDPAQLPAP

SEQ ID NO: 21926 - protein, 14 aa, Severe acute respiratory syndrome-related coronavirus
  REGION 1..14: note = Table B: HLA-DRB1*11:02L HLA-DRB4*01:01L HLA-DPA1*01:03-B1*04:01L HLA-DRB1*15:01L
  source 1..14: note = Severe acute respiratory syndrome coronavirus 2
YVYIGDPAQLPAPR

SEQ ID NO: 21927 - protein, 14 aa, Severe acute respiratory syndrome-related coronavirus
  REGION 1..14: note = Table B: HLA-DRB1*11:02L HLA-DRB5*01:01L HLA-DQA1*05:05-B1*03:19L HLA-DPA1*01:03-B1*04:02L HLA-DRB1*07:01L HLA-DRB1*08:02L HLA-DRB1*15:01L
  source 1..14: note = Severe acute respiratory syndrome coronavirus 2
VSALVYDNKLKAHK

SEQ ID NO: 21928 - protein, 18 aa, Severe acute respiratory syndrome-related coronavirus
  REGION 1..18: note = Table B: HLA-DRB1*11:02L HLA-DRB1*14:02L
  source 1..18: note = Severe acute respiratory syndrome coronavirus 2
SAQCFKMFYKGVITHDVS

SEQ ID NO: 21929 - protein, 13 aa, Severe acute respiratory syndrome-related coronavirus
  REGION 1..13: note = Table B: HLA-DRB1*11:02L HLA-DPA1*01:03-B1*02:01L HLA-DPA1*01:03-B1*104:01L HLA-DRB1*08:02L HLA-DRB1*15:01L
  source 1..13: note = Severe acute respiratory syndrome coronavirus 2
KGVITHDVSSAIN

SEQ ID NO: 21930 - protein, 14 aa, Severe acute respiratory syndrome-related coronavirus
  REGION 1..14: note = Table B: HLA-DRB1*11:02L HLA-DPA1*01:03-B1*02:01L HLA-DPA1*01:03-B1*104:01L HLA-DRB1*08:02L HLA-DRB1*15:01L
  source 1..14: note = Severe acute respiratory syndrome coronavirus 2
GVITHDVSSAINRP

SEQ ID NO: 21931 - protein, 17 aa, Severe acute respiratory syndrome-related coronavirus
  REGION 1..17: note = Table B: HLA-DRB1*11:02L
  source 1..17: note = Severe acute respiratory syndrome coronavirus 2
NPAWRKAVFISPYNSQN

SEQ ID NO: 21932 - protein, 14 aa, Severe acute respiratory syndrome-related coronavirus
  REGION 1..14: note = Table B: HLA-DRB1*11:02L HLA-DQA1*05:05-B1*03:116L
  source 1..14: note = Severe acute respiratory syndrome coronavirus 2
ISPYNSQNAVASKI

SEQ ID NO: 21933 - protein, 16 aa, Severe acute respiratory syndrome-related coronavirus
  REGION 1..16: note = Table B: HLA-DRB1*11:02L HLA-DPA1*01:03-B1*04:01L HLA-DPA1*01:03-B1*04:02L
  source 1..16: note = Severe acute respiratory syndrome coronavirus 2
SKILGLPTQTVDSSQG

SEQ ID NO: 21934 - protein, 11 aa, Severe acute respiratory syndrome-related coronavirus
  REGION 1..11: note = Table B: HLA-DRB1*11:02L
  source 1..11: note = Severe acute respiratory syndrome coronavirus 2
VDSSQGSEYDY

SEQ ID NO: 21935 - protein, 14 aa, Severe acute respiratory syndrome-related coronavirus
  REGION 1..14: note = Table B: HLA-DRB1*11:02L HLA-DRB4*02:01NL HLA-DPA1*01:03-B1*04:01L HLA-DQA1*05:05-B1*03:116L HLA-DRB1*15:01L
  source 1..14: note = Severe acute respiratory syndrome coronavirus 2
DYVIFTQTTETAHS

SEQ ID NO: 21936 - protein, 17 aa, Severe acute respiratory syndrome-related coronavirus
  REGION 1..17: note = Table B: HLA-DRB1*11:02L
  source 1..17: note = Severe acute respiratory syndrome coronavirus 2
DKLQFTSLEIPRRNVAT

SEQ ID NO: 21937 - protein, 18 aa, Severe acute respiratory syndrome-related coronavirus
  REGION 1..18: note = Table B: HLA-DRB1*11:02L HLA-DRB1*14:02L HLA-DQA1*05:05-B1*03:19L HLA-DPA1*01:03-B1*04:02L
  source 1..18: note = Severe acute respiratory syndrome coronavirus 2
VTGLFKDCSKVITGLHPT

SEQ ID NO: 21938 - protein, 15 aa, Severe acute respiratory syndrome-related coronavirus
  REGION 1..15: note = Table B: HLA-DRB1*11:02L
  source 1..15: note = Severe acute respiratory syndrome coronavirus 2
KMNYQVNGYPNMFIT

SEQ ID NO: 21939 - protein, 16 aa, Severe acute respiratory syndrome-related coronavirus
  REGION 1..16: note = Table B: HLA-DRB1*11:02L
  source 1..16: note = Severe acute respiratory syndrome coronavirus 2
NYQVNGYPNMFITREE

SEQ ID NO: 21940 - protein, 16 aa, Severe acute respiratory syndrome-related coronavirus
  REGION 1..16: note = Table B: HLA-DRB1*11:02L HLA-DRB1*13:01L HLA-DPA1*01:03-B1*04:02L
  source 1..16: note = Severe acute respiratory syndrome coronavirus 2
YPNMFITREEAIRHVR

SEQ ID NO: 21941 - protein, 15 aa, Severe acute respiratory syndrome-related coronavirus
  REGION 1..15: note = Table B: HLA-DRB1*11:02L HLA-DRB1*11:01L HLA-DRB1*08:03L
  source 1..15: note = Severe acute respiratory syndrome coronavirus 2
DRVVFVLWAHGFELT

SEQ ID NO: 21942 - protein, 16 aa, Severe acute respiratory syndrome-related coronavirus
  REGION 1..16: note = Table B: HLA-DRB1*11:02L
  source 1..16: note = Severe acute respiratory syndrome coronavirus 2
VVFVLWAHGFELTSMK

SEQ ID NO: 21943 - protein, 17 aa, Severe acute respiratory syndrome-related coronavirus
  REGION 1..17: note = Table B: HLA-DRB1*11:02L HLA-DQA1*05:05-B1*03:19L HLA-DQA1*05:01-B1*02:01L
  source 1..17: note = Severe acute respiratory syndrome coronavirus 2
VQHMVVKAALLADKFPV

SEQ ID NO: 21944 - protein, 17 aa, Severe acute respiratory syndrome-related coronavirus
  REGION 1..17: note = Table B: HLA-DRB1*11:02L
  source 1..17: note = Severe acute respiratory syndrome coronavirus 2
VKAALLADKFPVLHDIG

SEQ ID NO: 21945 - protein, 14 aa, Severe acute respiratory syndrome-related coronavirus
  REGION 1..14: note = Table B: HLA-DRB1*11:02L HLA-DRB1*13:01L HLA-DQA1*05:05-B1*03:116L HLA-DRB1*08:02L HLA-DRB1*15:01L
  source 1..14: note = Severe acute respiratory syndrome coronavirus 2
TPAFDKSAFVNLKQ

SEQ ID NO: 21946 - protein, 13 aa, Severe acute respiratory syndrome-related coronavirus
  REGION 1..13: note = Table B: HLA-DRB1*11:02L HLA-DPA1*01:03-B1*02:01L HLA-DRB1*08:02L
  source 1..13: note = Severe acute respiratory syndrome coronavirus 2
DKSAFVNLKQLPF

SEQ ID NO: 21947 - protein, 13 aa, Severe acute respiratory syndrome-related coronavirus
  REGION 1..13: note = Table B: HLA-DRB1*11:02L HLA-DRB1*08:02L
  source 1..13: note = Severe acute respiratory syndrome coronavirus 2
KSAFVNLKQLPFF

SEQ ID NO: 21948 - protein, 12 aa, Severe acute respiratory syndrome-related coronavirus
  REGION 1..12: note = Table B: HLA-DRB1*11:02L
  source 1..12: note = Severe acute respiratory syndrome coronavirus 2
AFVNLKQLPFFY

SEQ ID NO: 21949 - protein, 12 aa, Severe acute respiratory syndrome-related coronavirus
  REGION 1..12: note = Table B: HLA-DRB1*11:02L
  source 1..12: note = Severe acute respiratory syndrome coronavirus 2
FVNLKQLPFFYY

SEQ ID NO: 21950 - protein, 14 aa, Severe acute respiratory syndrome-related coronavirus
  REGION 1..14: note = Table B: HLA-DRB1*11:02L
  source 1..14: note = Severe acute respiratory syndrome coronavirus 2
GFSLWVYKQFDTYN

SEQ ID NO: 21951 - protein, 15 aa, Severe acute respiratory syndrome-related coronavirus
  REGION 1..15: note = Table B: HLA-DRB1*11:02L
  source 1..15: note = Severe acute respiratory syndrome coronavirus 2
SLWVYKQFDTYNLWN

SEQ ID NO: 21952 - protein, 14 aa, Severe acute respiratory syndrome-related coronavirus
  REGION 1..14: note = Table B: HLA-DRB1*11:02L HLA-DRB1*08:02L HLA-DRB1*08:03L
  source 1..14: note = Severe acute respiratory syndrome coronavirus 2
LENVAFNVVNKGHF

SEQ ID NO: 21953 - protein, 15 aa, Severe acute respiratory syndrome-related coronavirus
  REGION 1..15: note = Table B: HLA-DRB1*11:02L HLA-DRB1*11:01L HLA-DRB3*01:01L HLA-DPA1*01:03-B1*02:01L
  source 1..15: note = Severe acute respiratory syndrome coronavirus 2
VPVSIINNTVYTKVD

SEQ ID NO: 21954 - protein, 16 aa, Severe acute respiratory syndrome-related coronavirus
  REGION 1..16: note = Table B: HLA-DRB1*11:02L
  source 1..16: note = Severe acute respiratory syndrome coronavirus 2
VSIINNTVYTKVDGVD

SEQ ID NO: 21955 - protein, 14 aa, Severe acute respiratory syndrome-related coronavirus
  REGION 1..14: note = Table B: HLA-DRB1*11:02L
  source 1..14: note = Severe acute respiratory syndrome coronavirus 2
ELFENKTTLPVNVA

SEQ ID NO: 21956 - protein, 15 aa, Severe acute respiratory syndrome-related coronavirus
  REGION 1..15: note = Table B: HLA-DRB1*11:02L HLA-DPA1*01:03-B1*04:02L
  source 1..15: note = Severe acute respiratory syndrome coronavirus 2
TVIWDYKRDAPAHIS

SEQ ID NO: 21957 - protein, 13 aa, Severe acute respiratory syndrome-related coronavirus
  REGION 1..13: note = Table B: HLA-DRB1*11:02L
  source 1..13: note = Severe acute respiratory syndrome coronavirus 2
WDYKRDAPAHIST

SEQ ID NO: 21958 - protein, 14 aa, Severe acute respiratory syndrome-related coronavirus
  REGION 1..14: note = Table B: HLA-DRB1*11:02L HLA-DQA1*01:01-B1*05:01L HLA-DRB4*01:01L
  source 1..14: note = Severe acute respiratory syndrome coronavirus 2
DYKRDAPAHISTIG

SEQ ID NO: 21959 - protein, 16 aa, Severe acute respiratory syndrome-related coronavirus
  REGION 1..16: note = Table B: HLA-DRB1*11:02L HLA-DPA1*01:03-B1*04:02L HLA-DPA1*01:03-B1*104:01L
  source 1..16: note = Severe acute respiratory syndrome coronavirus 2
VDLFRNARNGVLITEG

SEQ ID NO: 21960 - protein, 17 aa, Severe acute respiratory syndrome-related coronavirus
  REGION 1..17: note = Table B: HLA-DRB1*11:02L HLA-DRB1*10:01L
  source 1..17: note = Severe acute respiratory syndrome coronavirus 2
PETYFTQSRNLQEFKPR

SEQ ID NO: 21961 - protein, 16 aa, Severe acute respiratory syndrome-related coronavirus
  REGION 1..16: note = Table B: HLA-DRB1*11:02L HLA-DRB1*11:03L HLA-DRB1*12:01L
  source 1..16: note = Severe acute respiratory syndrome coronavirus 2
LHLLIGLAKRFKESPF

SEQ ID NO: 21962 - protein, 16 aa, Severe acute respiratory syndrome-related coronavirus
  REGION 1..16: note = Table B: HLA-DRB1*11:02L HLA-DRB1*14:02L HLA-DPA1*01:03-B1*04:02L HLA-DPA1*03:01-B1*105:01L HLA-DRB1*08:02L
  source 1..16: note = Severe acute respiratory syndrome coronavirus 2
HLLIGLAKRFKESPFE

SEQ ID NO: 21963 - protein, 16 aa, Severe acute respiratory syndrome-related coronavirus
  REGION 1..16: note = Table B: HLA-DRB1*11:02L
  source 1..16: note = Severe acute respiratory syndrome coronavirus 2
SPFELEDFIPMDSTVK

SEQ ID NO: 21964 - protein, 12 aa, Severe acute respiratory syndrome-related coronavirus
  REGION 1..12: note = Table B: HLA-DRB1*11:02L HLA-DQA1*05:05-B1*03:116L
  source 1..12: note = Severe acute respiratory syndrome coronavirus 2
YFITDAQTGSSK

SEQ ID NO: 21965 - protein, 17 aa, Severe acute respiratory syndrome-related coronavirus
  REGION 1..17: note = Table B: HLA-DRB1*11:02L
  source 1..17: note = Severe acute respiratory syndrome coronavirus 2
VIDLLLDDFVEIIKSQD

SEQ ID NO: 21966 - protein, 14 aa, Severe acute respiratory syndrome-related coronavirus
  REGION 1..14: note = Table B: HLA-DRB1*11:02L HLA-DRB4*01:01L
  source 1..14: note = Severe acute respiratory syndrome coronavirus 2
DFVEIIKSQDLSVV

SEQ ID NO: 21967 - protein, 20 aa, Severe acute respiratory syndrome-related coronavirus
  REGION 1..20: note = Table B: HLA-DRB1*11:02L
  source 1..20: note = Severe acute respiratory syndrome coronavirus 2
DGHVETFYPKLQSSQAWQPG

SEQ ID NO: 21968 - protein, 18 aa, Severe acute respiratory syndrome-related coronavirus
  REGION 1..18: note = Table B: HLA-DRB1*11:02L HLA-DQA1*05:05-B1*03:116L
  source 1..18: note = Severe acute respiratory syndrome coronavirus 2
LPTGTLLVDSDLNDFVSD

SEQ ID NO: 21969 - protein, 18 aa, Severe acute respiratory syndrome-related coronavirus
  REGION 1..18: note = Table B: HLA-DRB1*11:02L
  source 1..18: note = Severe acute respiratory syndrome coronavirus 2
ISDMYDPKTKNVTKENDS

SEQ ID NO: 21970 - protein, 17 aa, Severe acute respiratory syndrome-related coronavirus
  REGION 1..17: note = Table B: HLA-DRB1*11:02L HLA-DQA1*05:01-B1*02:01L HLA-DPA1*01:03-B1*104:01L HLA-DRB1*07:01L
  source 1..17: note = Severe acute respiratory syndrome coronavirus 2
DSKEGFFTYICGFIQQK

SEQ ID NO: 21971 - protein, 16 aa, Severe acute respiratory syndrome-related coronavirus
  REGION 1..16: note = Table B: HLA-DRB1*11:02L
  source 1..16: note = Severe acute respiratory syndrome coronavirus 2
IDGYVMHANYIFWRNT

SEQ ID NO: 21972 - protein, 18 aa, Severe acute respiratory syndrome-related coronavirus
  REGION 1..18: note = Table B: HLA-DRB1*11:02L
  source 1..18: note = Severe acute respiratory syndrome coronavirus 2
NPIQLSSYSLFDMSKFPL

SEQ ID NO: 21973 - protein, 14 aa, Severe acute respiratory syndrome-related coronavirus
  REGION 1..14: note = Table B: HLA-DRB1*11:02L HLA-DRB1*13:01L HLA-DPA1*01:03-B1*04:02L HLA-DPA1*02:01-B1*13:01L HLA-DPA1*01:03-B1*104:01L HLA-DQA1*05:05-B1*03:01L HLA-DRB1*07:01L HLA-DQA1*01:03-B1*06:01L HLA-DRB1*08:02L
  REGION 1..14: note = CONT. FROM ABOVE: HLA-DRB1*08:03L
  source 1..14: note = Severe acute respiratory syndrome coronavirus 2
LIIRENNRVVISSD

SEQ ID NO: 21974 - protein, 13 aa, Severe acute respiratory syndrome-related coronavirus
  REGION 1..13: note = Table B: HLA-DRB1*11:02L
  source 1..13: note = Severe acute respiratory syndrome coronavirus 2
GVYYPDKVFRSSV

SEQ ID NO: 21975 - protein, 15 aa, Severe acute respiratory syndrome-related coronavirus
  REGION 1..15: note = Table B: HLA-DRB1*11:02L HLA-DPA1*01:03-B1*04:01L
  source 1..15: note = Severe acute respiratory syndrome coronavirus 2
SNVTWFHAIHVSGTN

SEQ ID NO: 21976 - protein, 16 aa, Severe acute respiratory syndrome-related coronavirus
  REGION 1..16: note = Table B: HLA-DRB1*11:02L
  source 1..16: note = Severe acute respiratory syndrome coronavirus 2
NDPFLGVYYHKNNKSW

SEQ ID NO: 21977 - protein, 16 aa, Severe acute respiratory syndrome-related coronavirus
  REGION 1..16: note = Table B: HLA-DRB1*11:02L HLA-DRB1*08:02L
  source 1..16: note = Severe acute respiratory syndrome coronavirus 2
DPFLGVYYHKNNKSWM

SEQ ID NO: 21978 - protein, 18 aa, Severe acute respiratory syndrome-related coronavirus
  REGION 1..18: note = Table B: HLA-DRB1*11:02L
  source 1..18: note = Severe acute respiratory syndrome coronavirus 2
VSQPFLMDLEGKQGNFKN

SEQ ID NO: 21979 - protein, 17 aa, Severe acute respiratory syndrome-related coronavirus
  REGION 1..17: note = Table B: HLA-DRB1*11:02L HLA-DRB1*11:03L
  source 1..17: note = Severe acute respiratory syndrome coronavirus 2
VFKNIDGYFKIYSKHTP

SEQ ID NO: 21980 - protein, 14 aa, Severe acute respiratory syndrome-related coronavirus
  REGION 1..14: note = Table B: HLA-DRB1*11:02L HLA-DRB1*13:01L HLA-DPA1*01:03-B1*04:01L HLA-DPA1*01:03-B1*04:02L HLA-DPA1*01:03-B1*02:01L HLA-DPA1*01:02-B1*04:01L
  source 1..14: note = Severe acute respiratory syndrome coronavirus 2
TPINLVRDLPQGFS

SEQ ID NO: 21981 - protein, 17 aa, Severe acute respiratory syndrome-related coronavirus
  REGION 1..17: note = Table B: HLA-DRB1*11:02L
  source 1..17: note = Severe acute respiratory syndrome coronavirus 2
LPIGINITRFQTLLALH

SEQ ID NO: 21982 - protein, 19 aa, Severe acute respiratory syndrome-related coronavirus
  REGION 1..19: note = Table B: HLA-DRB1*11:02L
  source 1..19: note = Severe acute respiratory syndrome coronavirus 2
PIGINITRFQTLLALHRSY

SEQ ID NO: 21983 - protein, 14 aa, Severe acute respiratory syndrome-related coronavirus
  REGION 1..14: note = Table B: HLA-DRB1*11:02L
  source 1..14: note = Severe acute respiratory syndrome coronavirus 2
AAAYYVGYLQPRTF

SEQ ID NO: 21984 - protein, 14 aa, Severe acute respiratory syndrome-related coronavirus
  REGION 1..14: note = Table B: HLA-DRB1*11:02L
  source 1..14: note = Severe acute respiratory syndrome coronavirus 2
AAYYVGYLQPRTFL

SEQ ID NO: 21985 - protein, 13 aa, Severe acute respiratory syndrome-related coronavirus
  REGION 1..13: note = Table B: HLA-DRB1*11:02L HLA-DQA1*01:01-B1*05:01L HLA-DRB5*01:01L HLA-DRB4*02:01NL HLA-DRB1*08:02L
  source 1..13: note = Severe acute respiratory syndrome coronavirus 2
GIYQTSNFRVQPT

SEQ ID NO: 21986 - protein, 16 aa, Severe acute respiratory syndrome-related coronavirus
  REGION 1..16: note = Table B: HLA-DRB1*11:02L HLA-DPA1*01:03-B1*104:01L
  source 1..16: note = Severe acute respiratory syndrome coronavirus 2
SASFSTFKCYGVSPTK

SEQ ID NO: 21987 - protein, 16 aa, Severe acute respiratory syndrome-related coronavirus
  REGION 1..16: note = Table B: HLA-DRB1*11:02L
  source 1..16: note = Severe acute respiratory syndrome coronavirus 2
TNVYADSFVIRGDEVR

SEQ ID NO: 21988 - protein, 11 aa, Severe acute respiratory syndrome-related coronavirus
  REGION 1..11: note = Table B: HLA-DRB1*11:02L
  source 1..11: note = Severe acute respiratory syndrome coronavirus 2
LDSKVGGNYNY

SEQ ID NO: 21989 - protein, 15 aa, Severe acute respiratory syndrome-related coronavirus
  REGION 1..15: note = Table B: HLA-DRB1*11:02L HLA-DRB1*14:02L HLA-DRB1*13:01L HLA-DPA1*01:03-B1*04:02L
  source 1..15: note = Severe acute respiratory syndrome coronavirus 2
VGGNYNYLYRLFRKS

SEQ ID NO: 21990 - protein, 14 aa, Severe acute respiratory syndrome-related coronavirus
  REGION 1..14: note = Table B: HLA-DRB1*11:02L HLA-DRB1*14:02L HLA-DRB1*13:01L HLA-DPA1*01:03-B1*04:02L
  source 1..14: note = Severe acute respiratory syndrome coronavirus 2
GNYNYLYRLFRKSN

SEQ ID NO: 21991 - protein, 16 aa, Severe acute respiratory syndrome-related coronavirus
  REGION 1..16: note = Table B: HLA-DRB1*11:02L HLA-DPA1*01:03-B1*04:02L HLA-DPA1*01:03-B1*02:01L
  source 1..16: note = Severe acute respiratory syndrome coronavirus 2
YNYLYRLFRKSNLKPF

SEQ ID NO: 21992 - protein, 15 aa, Severe acute respiratory syndrome-related coronavirus
  REGION 1..15: note = Table B: HLA-DRB1*11:02L HLA-DPA1*03:01-B1*105:01L HLA-DRB1*08:03L
  source 1..15: note = Severe acute respiratory syndrome coronavirus 2
YLYRLFRKSNLKPFE

SEQ ID NO: 21993 - protein, 15 aa, Severe acute respiratory syndrome-related coronavirus
  REGION 1..15: note = Table B: HLA-DRB1*11:02L HLA-DRB1*09:01L HLA-DPA1*01:03-B1*104:01L HLA-DRB1*10:01L
  source 1..15: note = Severe acute respiratory syndrome coronavirus 2
GVGYQPYRVVVLSFE

SEQ ID NO: 21994 - protein, 16 aa, Severe acute respiratory syndrome-related coronavirus
  REGION 1..16: note = Table B: HLA-DRB1*11:02L
  source 1..16: note = Severe acute respiratory syndrome coronavirus 2
FLPFQQFGRDIADTTD

SEQ ID NO: 21995 - protein, 15 aa, Severe acute respiratory syndrome-related coronavirus
  REGION 1..15: note = Table B: HLA-DRB1*11:02L HLA-DPA1*01:03-B1*02:01L HLA-DRB1*15:01L
  source 1..15: note = Severe acute respiratory syndrome coronavirus 2
TPTWRVYSTGSNVFQ

SEQ ID NO: 21996 - protein, 15 aa, Severe acute respiratory syndrome-related coronavirus
  REGION 1..15: note = Table B: HLA-DRB1*11:02L HLA-DRB1*14:02L HLA-DRB1*08:01L HLA-DRB1*11:01L HLA-DPA1*02:01-B1*13:01L HLA-DRB1*07:01L
  source 1..15: note = Severe acute respiratory syndrome coronavirus 2
SQSIIAYTMSLGAEN

SEQ ID NO: 21997 - protein, 17 aa, Severe acute respiratory syndrome-related coronavirus
  REGION 1..17: note = Table B: HLA-DRB1*11:02L HLA-DPA1*01:03-B1*04:01L HLA-DQA1*05:05-B1*03:116L
  source 1..17: note = Severe acute respiratory syndrome coronavirus 2
IPTNFTISVTTEILPVS

SEQ ID NO: 21998 - protein, 16 aa, Severe acute respiratory syndrome-related coronavirus
  REGION 1..16: note = Table B: HLA-DRB1*11:02L HLA-DRB4*01:01L
  source 1..16: note = Severe acute respiratory syndrome coronavirus 2
VKQIYKTPPIKDFGGF

SEQ ID NO: 21999 - protein, 19 aa, Severe acute respiratory syndrome-related coronavirus
  REGION 1..19: note = Table B: HLA-DRB1*11:02L
  source 1..19: note = Severe acute respiratory syndrome coronavirus 2
PPIKDFGGFNFSQILPDPS

SEQ ID NO: 22000 - protein, 16 aa, Severe acute respiratory syndrome-related coronavirus
  REGION 1..16: note = Table B: HLA-DRB1*11:02L
  source 1..16: note = Severe acute respiratory syndrome coronavirus 2
FGGFNFSQILPDPSKP

SEQ ID NO: 22001 - protein, 14 aa, Severe acute respiratory syndrome-related coronavirus
  REGION 1..14: note = Table B: HLA-DRB1*11:02L
  source 1..14: note = Severe acute respiratory syndrome coronavirus 2
FNFSQILPDPSKPS

SEQ ID NO: 22002 - protein, 15 aa, Severe acute respiratory syndrome-related coronavirus
  REGION 1..15: note = Table B: HLA-DRB1*11:02L HLA-DRB1*07:01L
  source 1..15: note = Severe acute respiratory syndrome coronavirus 2
TDEMIAQYTSALLAG

SEQ ID NO: 22003 - protein, 16 aa, Severe acute respiratory syndrome-related coronavirus
  REGION 1..16: note = Table B: HLA-DRB1*11:02L
  source 1..16: note = Severe acute respiratory syndrome coronavirus 2
QKLIANQFNSAIGKIQ

SEQ ID NO: 22004 - protein, 15 aa, Severe acute respiratory syndrome-related coronavirus
  REGION 1..15: note = Table B: HLA-DRB1*11:02L HLA-DRB4*01:01L
  source 1..15: note = Severe acute respiratory syndrome coronavirus 2
IANQFNSAIGKIQDS

SEQ ID NO: 22005 - protein, 14 aa, Severe acute respiratory syndrome-related coronavirus
  REGION 1..14: note = Table B: HLA-DRB1*11:02L HLA-DRB1*14:02L HLA-DPA1*01:03-B1*04:02L HLA-DPA1*01:03-B1*02:01L
  source 1..14: note = Severe acute respiratory syndrome coronavirus 2
ALNTLVKQLSSNFG

SEQ ID NO: 22006 - protein, 14 aa, Severe acute respiratory syndrome-related coronavirus
  REGION 1..14: note = Table B: HLA-DRB1*11:02L HLA-DRB1*11:03L HLA-DRB1*14:02L HLA-DRB1*11:01L HLA-DQA1*05:05-B1*03:19L HLA-DQA1*05:05-B1*03:116L HLA-DPA1*01:03-B1*04:02L HLA-DRB3*01:01L HLA-DQA1*05:05-B1*03:01L HLA-DRB1*08:02L
  source 1..14: note = Severe acute respiratory syndrome coronavirus 2
DILSRLDKVEAEVQ

SEQ ID NO: 22007 - protein, 15 aa, Severe acute respiratory syndrome-related coronavirus
  REGION 1..15: note = Table B: HLA-DRB1*11:02L HLA-DRB4*01:01L HLA-DPA1*01:03-B1*04:02L HLA-DRB1*08:02L
  source 1..15: note = Severe acute respiratory syndrome coronavirus 2
ITGRLQSLQTYVTQQ

SEQ ID NO: 22008 - protein, 15 aa, Severe acute respiratory syndrome-related coronavirus
  REGION 1..15: note = Table B: HLA-DRB1*11:02L HLA-DRB4*01:01L HLA-DPA1*01:03-B1*04:02L
  source 1..15: note = Severe acute respiratory syndrome coronavirus 2
TGRLQSLQTYVTQQL

SEQ ID NO: 22009 - protein, 18 aa, Severe acute respiratory syndrome-related coronavirus
  REGION 1..18: note = Table B: HLA-DRB1*11:02L
  source 1..18: note = Severe acute respiratory syndrome coronavirus 2
LHVTYVPAQEKNFTTAPA

SEQ ID NO: 22010 - protein, 14 aa, Severe acute respiratory syndrome-related coronavirus
  REGION 1..14: note = Table B: HLA-DRB1*11:02L HLA-DPA1*01:03-B1*02:01L
  source 1..14: note = Severe acute respiratory syndrome coronavirus 2
EGVFVSNGTHWFVT

SEQ ID NO: 22011 - protein, 14 aa, Severe acute respiratory syndrome-related coronavirus
  REGION 1..14: note = Table B: HLA-DRB1*11:02L HLA-DRB1*11:04L HLA-DRB1*04:08L
  source 1..14: note = Severe acute respiratory syndrome coronavirus 2
GVFVSNGTHWFVTQ

SEQ ID NO: 22012 - protein, 14 aa, Severe acute respiratory syndrome-related coronavirus
  REGION 1..14: note = Table B: HLA-DRB1*11:02L HLA-DQA1*01:01-B1*05:01L HLA-DRB4*02:01NL HLA-DRB1*13:01L HLA-DPA1*01:03-B1*04:01L HLA-DPA1*01:03-B1*04:02L HLA-DPA1*02:01-B1*13:01L HLA-DPA1*01:03-B1*02:01L HLA-DPA1*01:03-B1*104:01L
  REGION 1..14: note = CONT. FROM ABOVE: HLA-DPA1*01:02-B1*04:01L HLA-DRB1*08:02L HLA-DRB1*15:01L
  source 1..14: note = Severe acute respiratory syndrome coronavirus 2
EPQIITTDNTFVSG

SEQ ID NO: 22013 - protein, 14 aa, Severe acute respiratory syndrome-related coronavirus
  REGION 1..14: note = Table B: HLA-DRB1*11:02L HLA-DPA1*01:03-B1*04:01L HLA-DRB3*01:01L
  source 1..14: note = Severe acute respiratory syndrome coronavirus 2
ISGINASVVNIQKE

SEQ ID NO: 22014 - protein, 15 aa, Severe acute respiratory syndrome-related coronavirus
  REGION 1..15: note = Table B: HLA-DRB1*11:02L
  source 1..15: note = Severe acute respiratory syndrome coronavirus 2
NASVVNIQKEIDRLN

SEQ ID NO: 22015 - protein, 13 aa, Severe acute respiratory syndrome-related coronavirus
  REGION 1..13: note = Table B: HLA-DRB1*11:02L HLA-DRB3*01:01L HLA-DRB1*08:02L
  source 1..13: note = Severe acute respiratory syndrome coronavirus 2
AVFQSASKIITLK

SEQ ID NO: 22016 - protein, 15 aa, Severe acute respiratory syndrome-related coronavirus
  REGION 1..15: note = Table B: HLA-DRB1*11:02L HLA-DRB1*08:02L
  source 1..15: note = Severe acute respiratory syndrome coronavirus 2
TSDYYQLYSTQLSTD

SEQ ID NO: 22017 - protein, 14 aa, Severe acute respiratory syndrome-related coronavirus
  REGION 1..14: note = Table B: HLA-DRB1*11:02L HLA-DRB1*11:01L HLA-DPA1*01:03-B1*02:01L HLA-DRB1*08:02L HLA-DRB1*15:01L
  source 1..14: note = Severe acute respiratory syndrome coronavirus 2
YYQLYSTQLSTDTG

SEQ ID NO: 22018 - protein, 14 aa, Severe acute respiratory syndrome-related coronavirus
  REGION 1..14: note = Table B: HLA-DRB1*11:02L HLA-DQA1*05:05-B1*03:116L HLA-DRB1*09:01L HLA-DRB3*01:01L HLA-DPA1*01:03-B1*104:01L HLA-DRB1*07:01L
  source 1..14: note = Severe acute respiratory syndrome coronavirus 2
VTFFIYNKIVDEPE

SEQ ID NO: 22019 - protein, 11 aa, Severe acute respiratory syndrome-related coronavirus
  REGION 1..11: note = Table B: HLA-DRB1*11:02L HLA-DQA1*05:05-B1*03:116L
  source 1..11: note = Severe acute respiratory syndrome coronavirus 2
IVDEPEEHVQI

SEQ ID NO: 22020 - protein, 16 aa, Severe acute respiratory syndrome-related coronavirus
  REGION 1..16: note = Table B: HLA-DRB1*11:02L
  source 1..16: note = Severe acute respiratory syndrome coronavirus 2
SNGTITVEELKKLLEQ

SEQ ID NO: 22021 - protein, 14 aa, Severe acute respiratory syndrome-related coronavirus
  REGION 1..14: note = Table B: HLA-DRB1*11:02L HLA-DRB1*11:03L HLA-DQA1*05:05-B1*03:116L HLA-DPA1*01:03-B1*02:01L HLA-DRB1*08:02L HLA-DRB1*08:03L
  source 1..14: note = Severe acute respiratory syndrome coronavirus 2
LSYFIASFRLFART

SEQ ID NO: 22022 - protein, 14 aa, Severe acute respiratory syndrome-related coronavirus
  REGION 1..14: note = Table B: HLA-DRB1*11:02L HLA-DRB1*11:03L HLA-DRB1*13:01L HLA-DPA1*01:03-B1*02:01L HLA-DRB1*08:02L
  source 1..14: note = Severe acute respiratory syndrome coronavirus 2
SYFIASFRLFARTR

SEQ ID NO: 22023 - protein, 16 aa, Severe acute respiratory syndrome-related coronavirus
  REGION 1..16: note = Table B: HLA-DRB1*11:02L HLA-DRB1*08:02L
  source 1..16: note = Severe acute respiratory syndrome coronavirus 2
AVILRGHLRIAGHHLG

SEQ ID NO: 22024 - protein, 15 aa, Severe acute respiratory syndrome-related coronavirus
  REGION 1..15: note = Table B: HLA-DRB1*11:02L
  source 1..15: note = Severe acute respiratory syndrome coronavirus 2
SYYKLGASQRVAGDS

SEQ ID NO: 22025 - protein, 15 aa, Severe acute respiratory syndrome-related coronavirus
  REGION 1..15: note = Table B: HLA-DRB1*11:02L HLA-DPA1*01:03-B1*02:01L
  source 1..15: note = Severe acute respiratory syndrome coronavirus 2
YYKLGASQRVAGDSG

SEQ ID NO: 22026 - protein, 13 aa, Severe acute respiratory syndrome-related coronavirus
  REGION 1..13: note = Table B: HLA-DRB1*11:02L HLA-DRB1*11:03L
  source 1..13: note = Severe acute respiratory syndrome coronavirus 2
LDYIINLIIKNLS

SEQ ID NO: 22027 - protein, 13 aa, Severe acute respiratory syndrome-related coronavirus
  REGION 1..13: note = Table B: HLA-DRB1*11:02L HLA-DRB1*08:02L
  source 1..13: note = Severe acute respiratory syndrome coronavirus 2
YIINLIIKNLSKS

SEQ ID NO: 22028 - protein, 14 aa, Severe acute respiratory syndrome-related coronavirus
  REGION 1..14: note = Table B: HLA-DRB1*11:02L HLA-DRB1*14:02L HLA-DQA1*05:05-B1*03:19L HLA-DPA1*02:01-B1*13:01L HLA-DQA1*05:05-B1*03:01L
  source 1..14: note = Severe acute respiratory syndrome coronavirus 2
IINLIIKNLSKSLT

SEQ ID NO: 22029 - protein, 18 aa, Severe acute respiratory syndrome-related coronavirus
  REGION 1..18: note = Table B: HLA-DRB1*11:02L HLA-DRB1*11:01L
  source 1..18: note = Severe acute respiratory syndrome coronavirus 2
LSKSLTENKYSQLDEEQP

SEQ ID NO: 22030 - protein, 16 aa, Severe acute respiratory syndrome-related coronavirus
  REGION 1..16: note = Table B: HLA-DRB1*11:02L HLA-DPA1*01:03-B1*02:01L HLA-DRB1*08:02L
  source 1..16: note = Severe acute respiratory syndrome coronavirus 2
SGTYEGNSPFHPLADN

SEQ ID NO: 22031 - protein, 14 aa, Severe acute respiratory syndrome-related coronavirus
  REGION 1..14: note = Table B: HLA-DRB1*11:02L
  source 1..14: note = Severe acute respiratory syndrome coronavirus 2
SPFHPLADNKFALT

SEQ ID NO: 22032 - protein, 13 aa, Severe acute respiratory syndrome-related coronavirus
  REGION 1..13: note = Table B: HLA-DRB1*11:02L HLA-DRB1*11:01L HLA-DRB1*08:02L
  source 1..13: note = Severe acute respiratory syndrome coronavirus 2
LGIITTVAAFHQE

SEQ ID NO: 22033 - protein, 11 aa, Severe acute respiratory syndrome-related coronavirus
  REGION 1..11: note = Table B: HLA-DRB1*11:02L
  source 1..11: note = Severe acute respiratory syndrome coronavirus 2
DEAGSKSPIQY

SEQ ID NO: 22034 - protein, 13 aa, Severe acute respiratory syndrome-related coronavirus
  REGION 1..13: note = Table B: HLA-DRB1*11:02L
  source 1..13: note = Severe acute respiratory syndrome coronavirus 2
SWFTALTQHGKED

SEQ ID NO: 22035 - protein, 17 aa, Severe acute respiratory syndrome-related coronavirus
  REGION 1..17: note = Table B: HLA-DRB1*11:02L HLA-DRB1*14:02L
  source 1..17: note = Severe acute respiratory syndrome coronavirus 2
SPDDQIGYYRRATRRIR

SEQ ID NO: 22036 - protein, 20 aa, Severe acute respiratory syndrome-related coronavirus
  REGION 1..20: note = Table B: HLA-DRB1*11:02L HLA-DRB1*14:02L HLA-DQA1*05:05-B1*03:19L
  source 1..20: note = Severe acute respiratory syndrome coronavirus 2
PDDQIGYYRRATRRIRGGDG

SEQ ID NO: 22037 - protein, 16 aa, Severe acute respiratory syndrome-related coronavirus
  REGION 1..16: note = Table B: HLA-DRB1*11:02L HLA-DQA1*01:01-B1*05:01L HLA-DRB4*02:01NL
  source 1..16: note = Severe acute respiratory syndrome coronavirus 2
DGIIWVATEGALNTPK

SEQ ID NO: 22038 - protein, 16 aa, Severe acute respiratory syndrome-related coronavirus
  REGION 1..16: note = Table B: HLA-DRB1*11:02L HLA-DRB4*01:01L HLA-DQA1*05:05-B1*03:116L
  source 1..16: note = Severe acute respiratory syndrome coronavirus 2
IIWVATEGALNTPKDH

SEQ ID NO: 22039 - protein, 16 aa, Severe acute respiratory syndrome-related coronavirus
  REGION 1..16: note = Table B: HLA-DRB1*11:02L
  source 1..16: note = Severe acute respiratory syndrome coronavirus 2
WPQIAQFAPSASAFFG

SEQ ID NO: 22040 - protein, 16 aa, Severe acute respiratory syndrome-related coronavirus
  REGION 1..16: note = Table B: HLA-DRB1*11:02L
  source 1..16: note = Severe acute respiratory syndrome coronavirus 2
ASAFFGMSRIGMEVTP

SEQ ID NO: 22041 - protein, 16 aa, Severe acute respiratory syndrome-related coronavirus
  REGION 1..16: note = Table B: HLA-DRB1*11:02L HLA-DQA1*05:05-B1*03:116L
  source 1..16: note = Severe acute respiratory syndrome coronavirus 2
TWLTYTGAIKLDDKDP

SEQ ID NO: 22042 - protein, 13 aa, Severe acute respiratory syndrome-related coronavirus
  REGION 1..13: note = Table B: HLA-DRB1*11:03L
  source 1..13: note = Severe acute respiratory syndrome coronavirus 2
EEVLSEARQHLKD

SEQ ID NO: 22043 - protein, 13 aa, Severe acute respiratory syndrome-related coronavirus
  REGION 1..13: note = Table B: HLA-DRB1*11:03L
  source 1..13: note = Severe acute respiratory syndrome coronavirus 2
KAAITILDGISQY

SEQ ID NO: 22044 - protein, 15 aa, Severe acute respiratory syndrome-related coronavirus
  REGION 1..15: note = Table B: HLA-DRB1*11:03L HLA-DQA1*05:05-B1*03:116L
  source 1..15: note = Severe acute respiratory syndrome coronavirus 2
KGLYRKCVKSREETG

SEQ ID NO: 22045 - protein, 14 aa, Severe acute respiratory syndrome-related coronavirus
  REGION 1..14: note = Table B: HLA-DRB1*11:03L HLA-DRB1*08:01L
  source 1..14: note = Severe acute respiratory syndrome coronavirus 2
ITFELDERIDKVLN

SEQ ID NO: 22046 - protein, 13 aa, Severe acute respiratory syndrome-related coronavirus
  REGION 1..13: note = Table B: HLA-DRB1*11:03L HLA-DRB1*11:04L HLA-DQA1*05:05-B1*03:19L HLA-DQA1*05:05-B1*03:01L HLA-DPA1*01:02-B1*04:01L HLA-DRB1*07:01L HLA-DQA1*01:03-B1*06:01L
  source 1..13: note = Severe acute respiratory syndrome coronavirus 2
AANVYLKHGGGVA

SEQ ID NO: 22047 - protein, 13 aa, Severe acute respiratory syndrome-related coronavirus
  REGION 1..13: note = Table B: HLA-DRB1*11:03L HLA-DRB1*14:54L HLA-DRB1*07:01L
  source 1..13: note = Severe acute respiratory syndrome coronavirus 2
VYLAVFDKNLYDK

SEQ ID NO: 22048 - protein, 12 aa, Severe acute respiratory syndrome-related coronavirus
  REGION 1..12: note = Table B: HLA-DRB1*11:03L HLA-DRB1*12:02L HLA-DRB1*14:17L HLA-DRB1*04:08L
  source 1..12: note = Severe acute respiratory syndrome coronavirus 2
NGYTVEEAKTVL

SEQ ID NO: 22049 - protein, 13 aa, Severe acute respiratory syndrome-related coronavirus
  REGION 1..13: note = Table B: HLA-DRB1*11:03L
  source 1..13: note = Severe acute respiratory syndrome coronavirus 2
AARYMRSLKVPAT

SEQ ID NO: 22050 - protein, 16 aa, Severe acute respiratory syndrome-related coronavirus
  REGION 1..16: note = Table B: HLA-DRB1*11:03L HLA-DRB1*08:03L
  source 1..16: note = Severe acute respiratory syndrome coronavirus 2
LPNDDTLRVEAFEYYH

SEQ ID NO: 22051 - protein, 15 aa, Severe acute respiratory syndrome-related coronavirus
  REGION 1..15: note = Table B: HLA-DRB1*11:03L
  source 1..15: note = Severe acute respiratory syndrome coronavirus 2
IDYKHYTPSFKKGAK

SEQ ID NO: 22052 - protein, 14 aa, Severe acute respiratory syndrome-related coronavirus
  REGION 1..14: note = Table B: HLA-DRB1*11:03L
  source 1..14: note = Severe acute respiratory syndrome coronavirus 2
YKHYTPSFKKGAKL

SEQ ID NO: 22053 - protein, 16 aa, Severe acute respiratory syndrome-related coronavirus
  REGION 1..16: note = Table B: HLA-DRB1*11:03L
  source 1..16: note = Severe acute respiratory syndrome coronavirus 2
VWHVNNATNKATYKPN

SEQ ID NO: 22054 - protein, 13 aa, Severe acute respiratory syndrome-related coronavirus
  REGION 1..13: note = Table B: HLA-DRB1*11:03L HLA-DRB1*11:04L HLA-DRB1*14:02L HLA-DQA1*05:05-B1*03:19L HLA-DRB1*04:10L HLA-DRB1*09:01L HLA-DPA1*01:03-B1*04:02L HLA-DRB1*08:03L
  source 1..13: note = Severe acute respiratory syndrome coronavirus 2
DNSSLTIKKPNEL

SEQ ID NO: 22055 - protein, 15 aa, Severe acute respiratory syndrome-related coronavirus
  REGION 1..15: note = Table B: HLA-DRB1*11:03L HLA-DRB1*09:01L HLA-DRB1*07:01L HLA-DRB1*08:03L
  source 1..15: note = Severe acute respiratory syndrome coronavirus 2
VPWDTIANYAKPFLN

SEQ ID NO: 22056 - protein, 15 aa, Severe acute respiratory syndrome-related coronavirus
  REGION 1..15: note = Table B: HLA-DRB1*11:03L HLA-DRB1*11:04L HLA-DRB1*11:01L HLA-DRB1*12:02L HLA-DRB1*14:54L HLA-DPA1*01:03-B1*02:01L HLA-DRB1*08:03L
  source 1..15: note = Severe acute respiratory syndrome coronavirus 2
DSAEVAVKMFDAYVN

SEQ ID NO: 22057 - protein, 11 aa, Severe acute respiratory syndrome-related coronavirus
  REGION 1..11: note = Table B: HLA-DRB1*11:03L HLA-DRB1*12:02L
  source 1..11: note = Severe acute respiratory syndrome coronavirus 2
AQVAKSHNIAL

SEQ ID NO: 22058 - protein, 13 aa, Severe acute respiratory syndrome-related coronavirus
  REGION 1..13: note = Table B: HLA-DRB1*11:03L HLA-DPA1*02:01-B1*13:01L HLA-DRB1*08:03L
  source 1..13: note = Severe acute respiratory syndrome coronavirus 2
ITPVHVMSKHTDF

SEQ ID NO: 22059 - protein, 14 aa, Severe acute respiratory syndrome-related coronavirus
  REGION 1..14: note = Table B: HLA-DRB1*11:03L HLA-DRB1*11:04L HLA-DRB1*04:08L
  source 1..14: note = Severe acute respiratory syndrome coronavirus 2
YESLRPDTRYVLMD

SEQ ID NO: 22060 - protein, 15 aa, Severe acute respiratory syndrome-related coronavirus
  REGION 1..15: note = Table B: HLA-DRB1*11:03L HLA-DRB1*14:02L
  source 1..15: note = Severe acute respiratory syndrome coronavirus 2
TKHFYWFFSNYLKRR

SEQ ID NO: 22061 - protein, 14 aa, Severe acute respiratory syndrome-related coronavirus
  REGION 1..14: note = Table B: HLA-DRB1*11:03L
  source 1..14: note = Severe acute respiratory syndrome coronavirus 2
SDVLYQPPQTSITS

SEQ ID NO: 22062 - protein, 13 aa, Severe acute respiratory syndrome-related coronavirus
  REGION 1..13: note = Table B: HLA-DRB1*11:03L HLA-DRB1*11:04L
  source 1..13: note = Severe acute respiratory syndrome coronavirus 2
NHNFLVQAGNVQL

SEQ ID NO: 22063 - protein, 11 aa, Severe acute respiratory syndrome-related coronavirus
  REGION 1..11: note = Table B: HLA-DRB1*11:03L HLA-DRB1*04:08L HLA-DRB1*08:02L
  source 1..11: note = Severe acute respiratory syndrome coronavirus 2
FLVQAGNVQLR

SEQ ID NO: 22064 - protein, 13 aa, Severe acute respiratory syndrome-related coronavirus
  REGION 1..13: note = Table B: HLA-DRB1*11:03L HLA-DRB5*01:01L HLA-DRB1*13:01L HLA-DRB1*08:03L
  source 1..13: note = Severe acute respiratory syndrome coronavirus 2
ILLAKDTTEAFEK

SEQ ID NO: 22065 - protein, 11 aa, Severe acute respiratory syndrome-related coronavirus
  REGION 1..11: note = Table B: HLA-DRB1*11:03L HLA-DRB1*14:02L HLA-DPA1*01:03-B1*04:01L HLA-DQA1*05:05-B1*03:116L HLA-DRB1*09:01L HLA-DPA1*01:03-B1*04:02L HLA-DRB1*12:02L HLA-DPA1*01:03-B1*104:01L HLA-DRB1*10:01L HLA-DRB1*08:03L
  source 1..11: note = Severe acute respiratory syndrome coronavirus 2
NIIPLTTAAKL

SEQ ID NO: 22066 - protein, 15 aa, Severe acute respiratory syndrome-related coronavirus
  REGION 1..15: note = Table B: HLA-DRB1*11:03L HLA-DRB1*15:03L
  source 1..15: note = Severe acute respiratory syndrome coronavirus 2
GGQPITNCVKMLCTH

SEQ ID NO: 22067 - protein, 13 aa, Severe acute respiratory syndrome-related coronavirus
  REGION 1..13: note = Table B: HLA-DRB1*11:03L HLA-DPA1*01:03-B1*04:01L HLA-DRB1*12:02L HLA-DPA1*01:03-B1*02:01L HLA-DRB1*08:03L
  source 1..13: note = Severe acute respiratory syndrome coronavirus 2
TNNVAFQTVKPGN

SEQ ID NO: 22068 - protein, 16 aa, Severe acute respiratory syndrome-related coronavirus
  REGION 1..16: note = Table B: HLA-DRB1*11:03L
  source 1..16: note = Severe acute respiratory syndrome coronavirus 2
AGFPFNKWGKARLYYD

SEQ ID NO: 22069 - protein, 13 aa, Severe acute respiratory syndrome-related coronavirus
  REGION 1..13: note = Table B: HLA-DRB1*11:03L
  source 1..13: note = Severe acute respiratory syndrome coronavirus 2
LKSIAATRGATVV

SEQ ID NO: 22070 - protein, 15 aa, Severe acute respiratory syndrome-related coronavirus
  REGION 1..15: note = Table B: HLA-DRB1*11:03L
  source 1..15: note = Severe acute respiratory syndrome coronavirus 2
ATVVIGTSKFYGGWH

SEQ ID NO: 22071 - protein, 16 aa, Severe acute respiratory syndrome-related coronavirus
  REGION 1..16: note = Table B: HLA-DRB1*11:03L HLA-DRB3*01:01L
  source 1..16: note = Severe acute respiratory syndrome coronavirus 2
YGGWHNMLKTVYSDVE

SEQ ID NO: 22072 - protein, 13 aa, Severe acute respiratory syndrome-related coronavirus
  REGION 1..13: note = Table B: HLA-DRB1*11:03L HLA-DRB1*14:02L HLA-DPA1*01:03-B1*04:01L HLA-DPA1*01:03-B1*04:02L HLA-DRB1*14:54L HLA-DPA1*01:03-B1*02:01L HLA-DRB1*08:02L
  source 1..13: note = Severe acute respiratory syndrome coronavirus 2
VNEFYAYLRKHFS

SEQ ID NO: 22073 - protein, 14 aa, Severe acute respiratory syndrome-related coronavirus
  REGION 1..14: note = Table B: HLA-DRB1*11:03L HLA-DRB1*07:01L
  source 1..14: note = Severe acute respiratory syndrome coronavirus 2
DYVYLPYPDPSRIL

SEQ ID NO: 22074 - protein, 13 aa, Severe acute respiratory syndrome-related coronavirus
  REGION 1..13: note = Table B: HLA-DRB1*11:03L HLA-DRB1*11:01L HLA-DRB1*13:01L
  source 1..13: note = Severe acute respiratory syndrome coronavirus 2
VREVLSDRELHLS

SEQ ID NO: 22075 - protein, 13 aa, Severe acute respiratory syndrome-related coronavirus
  REGION 1..13: note = Table B: HLA-DRB1*11:03L
  source 1..13: note = Severe acute respiratory syndrome coronavirus 2
DAVVYRGTTTYKL

SEQ ID NO: 22076 - protein, 16 aa, Severe acute respiratory syndrome-related coronavirus
  REGION 1..16: note = Table B: HLA-DRB1*11:03L HLA-DPA1*03:01-B1*105:01L
  source 1..16: note = Severe acute respiratory syndrome coronavirus 2
VREFLTRNPAWRKAVF

SEQ ID NO: 22077 - protein, 15 aa, Severe acute respiratory syndrome-related coronavirus
  REGION 1..15: note = Table B: HLA-DRB1*11:03L
  source 1..15: note = Severe acute respiratory syndrome coronavirus 2
DGGSLYVNKHAFHTP

SEQ ID NO: 22078 - protein, 14 aa, Severe acute respiratory syndrome-related coronavirus
  REGION 1..14: note = Table B: HLA-DRB1*11:03L HLA-DRB1*14:02L HLA-DRB3*01:01L HLA-DPA1*02:01-B1*13:01L HLA-DPA1*01:03-B1*104:01L
  source 1..14: note = Severe acute respiratory syndrome coronavirus 2
YNLWNTFTRLQSLE

SEQ ID NO: 22079 - protein, 15 aa, Severe acute respiratory syndrome-related coronavirus
  REGION 1..15: note = Table B: HLA-DRB1*11:03L HLA-DPA1*01:03-B1*04:02L
  source 1..15: note = Severe acute respiratory syndrome coronavirus 2
VKTQFNYYKKVDGVV

SEQ ID NO: 22080 - protein, 12 aa, Severe acute respiratory syndrome-related coronavirus
  REGION 1..12: note = Table B: HLA-DRB1*11:03L HLA-DRB1*11:04L HLA-DRB1*11:01L HLA-DRB1*09:01L HLA-DRB1*12:02L HLA-DRB3*01:01L HLA-DPA1*01:03-B1*02:01L HLA-DPA1*01:03-B1*104:01L HLA-DRB1*07:01L HLA-DRB1*10:01L HLA-DRB1*08:02L
  source 1..12: note = Severe acute respiratory syndrome coronavirus 2
DDFVEIIKSQDL

SEQ ID NO: 22081 - protein, 12 aa, Severe acute respiratory syndrome-related coronavirus
  REGION 1..12: note = Table B: HLA-DRB1*11:03L HLA-DRB1*11:04L HLA-DQA1*01:01-B1*05:01L HLA-DRB1*11:01L HLA-DRB1*09:01L HLA-DRB1*12:02L HLA-DRB3*01:01L HLA-DPA1*01:03-B1*02:01L HLA-DPA1*01:03-B1*104:01L HLA-DRB1*07:01L HLA-DRB1*10:01L
  REGION 1..12: note = CONT. FROM ABOVE: HLA-DRB1*08:02L
  source 1..12: note = Severe acute respiratory syndrome coronavirus 2
DFVEIIKSQDLS

SEQ ID NO: 22082 - protein, 16 aa, Severe acute respiratory syndrome-related coronavirus
  REGION 1..16: note = Table B: HLA-DRB1*11:03L
  source 1..16: note = Severe acute respiratory syndrome coronavirus 2
ISDMYDPKTKNVTKEN

SEQ ID NO: 22083 - protein, 15 aa, Severe acute respiratory syndrome-related coronavirus
  REGION 1..15: note = Table B: HLA-DRB1*11:03L
  source 1..15: note = Severe acute respiratory syndrome coronavirus 2
SEAFLIGCNYLGKPR

SEQ ID NO: 22084 - protein, 15 aa, Severe acute respiratory syndrome-related coronavirus
  REGION 1..15: note = Table B: HLA-DRB1*11:03L HLA-DRB1*13:01L
  source 1..15: note = Severe acute respiratory syndrome coronavirus 2
DMILSLLSKGRLIIR

SEQ ID NO: 22085 - protein, 16 aa, Severe acute respiratory syndrome-related coronavirus
  REGION 1..16: note = Table B: HLA-DRB1*11:03L HLA-DRB1*08:02L HLA-DRB1*08:03L
  source 1..16: note = Severe acute respiratory syndrome coronavirus 2
NKSWMESEFRVYSSAN

SEQ ID NO: 22086 - protein, 14 aa, Severe acute respiratory syndrome-related coronavirus
  REGION 1..14: note = Table B: HLA-DRB1*11:03L HLA-DRB1*14:54L
  source 1..14: note = Severe acute respiratory syndrome coronavirus 2
IDGYFKIYSKHTPI

SEQ ID NO: 22087 - protein, 14 aa, Severe acute respiratory syndrome-related coronavirus
  REGION 1..14: note = Table B: HLA-DRB1*11:03L HLA-DQA1*05:05-B1*03:01L HLA-DRB1*10:01L HLA-DRB1*08:03L HLA-DRB1*15:01L
  source 1..14: note = Severe acute respiratory syndrome coronavirus 2
INITRFQTLLALHR

SEQ ID NO: 22088 - protein, 11 aa, Severe acute respiratory syndrome-related coronavirus
  REGION 1..11: note = Table B: HLA-DRB1*11:03L
  source 1..11: note = Severe acute respiratory syndrome coronavirus 2
YGFQPTNGVGY

SEQ ID NO: 22089 - protein, 13 aa, Severe acute respiratory syndrome-related coronavirus
  REGION 1..13: note = Table B: HLA-DRB1*11:03L HLA-DQA1*01:01-B1*05:01L HLA-DRB1*08:01L HLA-DRB1*08:03L
  source 1..13: note = Severe acute respiratory syndrome coronavirus 2
IAVEQDKNTQEVF

SEQ ID NO: 22090 - protein, 14 aa, Severe acute respiratory syndrome-related coronavirus
  REGION 1..14: note = Table B: HLA-DRB1*11:03L
  source 1..14: note = Severe acute respiratory syndrome coronavirus 2
FAQVKQIYKTPPIK

SEQ ID NO: 22091 - protein, 15 aa, Severe acute respiratory syndrome-related coronavirus
  REGION 1..15: note = Table B: HLA-DRB1*11:03L HLA-DRB1*04:08L
  source 1..15: note = Severe acute respiratory syndrome coronavirus 2
FNGIGVTQNVLYENQ

SEQ ID NO: 22092 - protein, 13 aa, Severe acute respiratory syndrome-related coronavirus
  REGION 1..13: note = Table B: HLA-DRB1*11:03L HLA-DRB1*11:04L HLA-DRB1*04:10L HLA-DRB1*07:01L
  source 1..13: note = Severe acute respiratory syndrome coronavirus 2
ENQKLIANQFNSA

SEQ ID NO: 22093 - protein, 13 aa, Severe acute respiratory syndrome-related coronavirus
  REGION 1..13: note = Table B: HLA-DRB1*11:03L HLA-DRB1*11:04L HLA-DRB1*14:02L HLA-DQA1*01:01-B1*05:01L HLA-DPA1*01:03-B1*04:01L HLA-DPA1*01:03-B1*04:02L HLA-DRB1*07:01L HLA-DRB1*10:01L HLA-DRB1*08:03L
  source 1..13: note = Severe acute respiratory syndrome coronavirus 2
IANQFNSAIGKIQ

SEQ ID NO: 22094 - protein, 13 aa, Severe acute respiratory syndrome-related coronavirus
  REGION 1..13: note = Table B: HLA-DRB1*11:03L HLA-DRB1*12:02L
  source 1..13: note = Severe acute respiratory syndrome coronavirus 2
NSAIGKIQDSLSS

SEQ ID NO: 22095 - protein, 11 aa, Severe acute respiratory syndrome-related coronavirus
  REGION 1..11: note = Table B: HLA-DRB1*11:03L HLA-DRB5*01:01L HLA-DQA1*01-B1*05L HLA-DPA1*01:03-B1*04:02L HLA-DRB1*12:02L HLA-DPA1*02:01-B1*13:01L HLA-DRB1*08:02L HLA-DRB1*15:03L
  source 1..11: note = Severe acute respiratory syndrome coronavirus 2
SVVNIQKEIDR

SEQ ID NO: 22096 - protein, 13 aa, Severe acute respiratory syndrome-related coronavirus
  REGION 1..13: note = Table B: HLA-DRB1*11:03L HLA-DPA1*02:01-B1*13:01L HLA-DRB1*08:03L
  source 1..13: note = Severe acute respiratory syndrome coronavirus 2
SASKIITLKKRWQ

SEQ ID NO: 22097 - protein, 13 aa, Severe acute respiratory syndrome-related coronavirus
  REGION 1..13: note = Table B: HLA-DRB1*11:03L
  source 1..13: note = Severe acute respiratory syndrome coronavirus 2
ASKIITLKKRWQL

SEQ ID NO: 22098 - protein, 11 aa, Severe acute respiratory syndrome-related coronavirus
  REGION 1..11: note = Table B: HLA-DRB1*11:03L
  source 1..11: note = Severe acute respiratory syndrome coronavirus 2
WQLALSKGVHF

SEQ ID NO: 22099 - protein, 14 aa, Severe acute respiratory syndrome-related coronavirus
  REGION 1..14: note = Table B: HLA-DRB1*11:03L
  source 1..14: note = Severe acute respiratory syndrome coronavirus 2
VKPSFYVYSRVKNL

SEQ ID NO: 22100 - protein, 13 aa, Severe acute respiratory syndrome-related coronavirus
  REGION 1..13: note = Table B: HLA-DRB1*11:03L
  source 1..13: note = Severe acute respiratory syndrome coronavirus 2
RGHLRIAGHHLGR

SEQ ID NO: 22101 - protein, 13 aa, Severe acute respiratory syndrome-related coronavirus
  REGION 1..13: note = Table B: HLA-DRB1*11:03L
  source 1..13: note = Severe acute respiratory syndrome coronavirus 2
SGFAAYSRYRIGN

SEQ ID NO: 22102 - protein, 12 aa, Severe acute respiratory syndrome-related coronavirus
  REGION 1..12: note = Table B: HLA-DRB1*11:03L HLA-DRB3*01:01L HLA-DPA1*01:03-B1*02:01L
  source 1..12: note = Severe acute respiratory syndrome coronavirus 2
YIINLIIKNLSK

SEQ ID NO: 22103 - protein, 18 aa, Severe acute respiratory syndrome-related coronavirus
  REGION 1..18: note = Table B: HLA-DRB1*11:03L HLA-DRB1*13:01L HLA-DRB1*09:01L HLA-DRB1*15:01L
  source 1..18: note = Severe acute respiratory syndrome coronavirus 2
SPKLFIRQEEVQELYSPI

SEQ ID NO: 22104 - protein, 13 aa, Severe acute respiratory syndrome-related coronavirus
  REGION 1..13: note = Table B: HLA-DRB1*11:04L HLA-DRB1*14:54L HLA-DRB1*08:03L
  source 1..13: note = Severe acute respiratory syndrome coronavirus 2
HSYGADLKSFDLG

SEQ ID NO: 22105 - protein, 13 aa, Severe acute respiratory syndrome-related coronavirus
  REGION 1..13: note = Table B: HLA-DRB1*11:04L HLA-DRB1*11:01L HLA-DRB1*04:10L HLA-DRB1*12:01L HLA-DQA1*03:01-B1*03:02L HLA-DRB1*14:17L HLA-DQA1*02:01-B1*03:03L HLA-DRB1*15:03L
  source 1..13: note = Severe acute respiratory syndrome coronavirus 2
GYPLECIKDLLAR

SEQ ID NO: 22106 - protein, 14 aa, Severe acute respiratory syndrome-related coronavirus
  REGION 1..14: note = Table B: HLA-DRB1*11:04L HLA-DRB1*11:01L
  source 1..14: note = Severe acute respiratory syndrome coronavirus 2
FEIKLAKKFDTFNG

SEQ ID NO: 22107 - protein, 15 aa, Severe acute respiratory syndrome-related coronavirus
  REGION 1..15: note = Table B: HLA-DRB1*11:04L HLA-DRB1*11:01L HLA-DRB3*01:01L
  source 1..15: note = Severe acute respiratory syndrome coronavirus 2
KTILRKGGRTIAFGG

SEQ ID NO: 22108 - protein, 15 aa, Severe acute respiratory syndrome-related coronavirus
  REGION 1..15: note = Table B: HLA-DRB1*11:04L
  source 1..15: note = Severe acute respiratory syndrome coronavirus 2
AARVVRSIFSRTLET

SEQ ID NO: 22109 - protein, 14 aa, Severe acute respiratory syndrome-related coronavirus
  REGION 1..14: note = Table B: HLA-DRB1*11:04L
  source 1..14: note = Severe acute respiratory syndrome coronavirus 2
SVNITFELDERIDK

SEQ ID NO: 22110 - protein, 13 aa, Severe acute respiratory syndrome-related coronavirus
  REGION 1..13: note = Table B: HLA-DRB1*11:04L
  source 1..13: note = Severe acute respiratory syndrome coronavirus 2
IQTIVEVQPQLEM

SEQ ID NO: 22111 - protein, 13 aa, Severe acute respiratory syndrome-related coronavirus
  REGION 1..13: note = Table B: HLA-DRB1*11:04L HLA-DRB1*04:10L HLA-DRB3*01:01L HLA-DRB1*04:08L
  source 1..13: note = Severe acute respiratory syndrome coronavirus 2
KPTVVVNAANVYL

SEQ ID NO: 22112 - protein, 14 aa, Severe acute respiratory syndrome-related coronavirus
  REGION 1..14: note = Table B: HLA-DRB1*11:04L
  source 1..14: note = Severe acute respiratory syndrome coronavirus 2
PYIVGDVVQEGVLT

SEQ ID NO: 22113 - protein, 13 aa, Severe acute respiratory syndrome-related coronavirus
  REGION 1..13: note = Table B: HLA-DRB1*11:04L HLA-DRB1*11:01L
  source 1..13: note = Severe acute respiratory syndrome coronavirus 2
QLGIEFLKRGDKS

SEQ ID NO: 22114 - protein, 14 aa, Severe acute respiratory syndrome-related coronavirus
  REGION 1..14: note = Table B: HLA-DRB1*11:04L HLA-DRB1*14:02L HLA-DRB1*09:01L HLA-DPA1*01:03-B1*04:02L HLA-DRB1*08:02L
  source 1..14: note = Severe acute respiratory syndrome coronavirus 2
VDNINLHTQVVDMS

SEQ ID NO: 22115 - protein, 14 aa, Severe acute respiratory syndrome-related coronavirus
  REGION 1..14: note = Table B: HLA-DRB1*11:04L HLA-DRB1*11:01L HLA-DRB3*01:01L
  source 1..14: note = Severe acute respiratory syndrome coronavirus 2
DGADVTKIKPHNSH

SEQ ID NO: 22116 - protein, 14 aa, Severe acute respiratory syndrome-related coronavirus
  REGION 1..14: note = Table B: HLA-DRB1*11:04L
  source 1..14: note = Severe acute respiratory syndrome coronavirus 2
GADVTKIKPHNSHE

SEQ ID NO: 22117 - protein, 14 aa, Severe acute respiratory syndrome-related coronavirus
  REGION 1..14: note = Table B: HLA-DRB1*11:04L HLA-DPA1*03:01-B1*105:01L HLA-DQA1*05:05-B1*03:01L
  source 1..14: note = Severe acute respiratory syndrome coronavirus 2
ADVTKIKPHNSHEG

SEQ ID NO: 22118 - protein, 16 aa, Severe acute respiratory syndrome-related coronavirus
  REGION 1..16: note = Table B: HLA-DRB1*11:04L HLA-DRB1*14:02L
  source 1..16: note = Severe acute respiratory syndrome coronavirus 2
TLRVEAFEYYHTTDPS

SEQ ID NO: 22119 - protein, 15 aa, Severe acute respiratory syndrome-related coronavirus
  REGION 1..15: note = Table B: HLA-DRB1*11:04L HLA-DRB1*11:01L
  source 1..15: note = Severe acute respiratory syndrome coronavirus 2
KRVLNVVCKTCGQQQ

SEQ ID NO: 22120 - protein, 19 aa, Severe acute respiratory syndrome-related coronavirus
  REGION 1..19: note = Table B: HLA-DRB1*11:04L HLA-DRB4*01:01L HLA-DQA1*05:05-B1*03:116L HLA-DRB1*15:01L
  source 1..19: note = Severe acute respiratory syndrome coronavirus 2
GPITDVFYKENSYTTTIKP

SEQ ID NO: 22121 - protein, 14 aa, Severe acute respiratory syndrome-related coronavirus
  REGION 1..14: note = Table B: HLA-DRB1*11:04L HLA-DRB1*14:02L HLA-DRB1*11:01L HLA-DQA1*05:01-B1*02:01L HLA-DRB1*08:03L
  source 1..14: note = Severe acute respiratory syndrome coronavirus 2
LDNYYKKDNSYFTE

SEQ ID NO: 22122 - protein, 13 aa, Severe acute respiratory syndrome-related coronavirus
  REGION 1..13: note = Table B: HLA-DRB1*11:04L HLA-DRB1*11:01L HLA-DPA1*01:03-B1*04:02L HLA-DRB3*01:01L HLA-DPA1*01:03-B1*02:01L
  source 1..13: note = Severe acute respiratory syndrome coronavirus 2
VAIDYKHYTPSFK

SEQ ID NO: 22123 - protein, 14 aa, Severe acute respiratory syndrome-related coronavirus
  REGION 1..14: note = Table B: HLA-DRB1*11:04L HLA-DRB1*11:01L HLA-DPA1*02:01-B1*13:01L
  source 1..14: note = Severe acute respiratory syndrome coronavirus 2
AIDYKHYTPSFKKG

SEQ ID NO: 22124 - protein, 14 aa, Severe acute respiratory syndrome-related coronavirus
  REGION 1..14: note = Table B: HLA-DRB1*11:04L HLA-DQA1*01:01-B1*05:01L HLA-DRB1*08:01L HLA-DRB1*08:03L
  source 1..14: note = Severe acute respiratory syndrome coronavirus 2
THGLAAVNSVPWDT

SEQ ID NO: 22125 - protein, 14 aa, Severe acute respiratory syndrome-related coronavirus
  REGION 1..14: note = Table B: HLA-DRB1*11:04L HLA-DRB1*08:01L HLA-DRB3*01:01L HLA-DRB1*16:01L
  source 1..14: note = Severe acute respiratory syndrome coronavirus 2
VARDLSLQFKRPIN

SEQ ID NO: 22126 - protein, 15 aa, Severe acute respiratory syndrome-related coronavirus
  REGION 1..15: note = Table B: HLA-DRB1*11:04L HLA-DPA1*03:01-B1*105:01L HLA-DRB1*07:01L
  source 1..15: note = Severe acute respiratory syndrome coronavirus 2
GQKTYERHSLSHFVN

SEQ ID NO: 22127 - protein, 13 aa, Severe acute respiratory syndrome-related coronavirus
  REGION 1..13: note = Table B: HLA-DRB1*11:04L HLA-DRB1*04:08L
  source 1..13: note = Severe acute respiratory syndrome coronavirus 2
LSTFISAARQGFV

SEQ ID NO: 22128 - protein, 13 aa, Severe acute respiratory syndrome-related coronavirus
  REGION 1..13: note = Table B: HLA-DRB1*11:04L
  source 1..13: note = Severe acute respiratory syndrome coronavirus 2
INAQVAKSHNIAL

SEQ ID NO: 22129 - protein, 14 aa, Severe acute respiratory syndrome-related coronavirus
  REGION 1..14: note = Table B: HLA-DRB1*11:04L HLA-DRB1*11:01L
  source 1..14: note = Severe acute respiratory syndrome coronavirus 2
NVKDFMSLSEQLRK

SEQ ID NO: 22130 - protein, 13 aa, Severe acute respiratory syndrome-related coronavirus
  REGION 1..13: note = Table B: HLA-DRB1*11:04L HLA-DQA1*03:01-B1*03:02L
  source 1..13: note = Severe acute respiratory syndrome coronavirus 2
LRKQIRSAAKKNN

SEQ ID NO: 22131 - protein, 14 aa, Severe acute respiratory syndrome-related coronavirus
  REGION 1..14: note = Table B: HLA-DRB1*11:04L HLA-DRB1*11:01L HLA-DRB3*01:01L
  source 1..14: note = Severe acute respiratory syndrome coronavirus 2
QIRSAAKKNNLPFK

SEQ ID NO: 22132 - protein, 14 aa, Severe acute respiratory syndrome-related coronavirus
  REGION 1..14: note = Table B: HLA-DRB1*11:04L
  source 1..14: note = Severe acute respiratory syndrome coronavirus 2
RQVVNVVTTKIALK

SEQ ID NO: 22133 - protein, 15 aa, Severe acute respiratory syndrome-related coronavirus
  REGION 1..15: note = Table B: HLA-DRB1*11:04L
  source 1..15: note = Severe acute respiratory syndrome coronavirus 2
HADFDTWFSQRGGSY

SEQ ID NO: 22134 - protein, 12 aa, Severe acute respiratory syndrome-related coronavirus
  REGION 1..12: note = Table B: HLA-DRB1*11:04L HLA-DRB1*08:01L HLA-DRB1*12:02L HLA-DQA1*05:05-B1*03:01L HLA-DRB1*07:01L HLA-DRB1*08:03L
  source 1..12: note = Severe acute respiratory syndrome coronavirus 2
SIIQFPNTYLEG

SEQ ID NO: 22135 - protein, 15 aa, Severe acute respiratory syndrome-related coronavirus
  REGION 1..15: note = Table B: HLA-DRB1*11:04L HLA-DRB1*11:01L HLA-DRB1*10:01L
  source 1..15: note = Severe acute respiratory syndrome coronavirus 2
FPNTYLEGSVRVVTT

SEQ ID NO: 22136 - protein, 13 aa, Severe acute respiratory syndrome-related coronavirus
  REGION 1..13: note = Table B: HLA-DRB1*11:04L HLA-DQA1*05:05-B1*03:19L HLA-DRB1*10:01L HLA-DRB1*08:03L
  source 1..13: note = Severe acute respiratory syndrome coronavirus 2
EGSVRVVTTFDSE

SEQ ID NO: 22137 - protein, 13 aa, Severe acute respiratory syndrome-related coronavirus
  REGION 1..13: note = Table B: HLA-DRB1*11:04L HLA-DRB1*12:01L HLA-DRB3*01:01L
  source 1..13: note = Severe acute respiratory syndrome coronavirus 2
LAYYFMRFRRAFG

SEQ ID NO: 22138 - protein, 14 aa, Severe acute respiratory syndrome-related coronavirus
  REGION 1..14: note = Table B: HLA-DRB1*11:04L
  source 1..14: note = Severe acute respiratory syndrome coronavirus 2
LNGLWLDDVVYCPR

SEQ ID NO: 22139 - protein, 14 aa, Severe acute respiratory syndrome-related coronavirus
  REGION 1..14: note = Table B: HLA-DRB1*11:04L HLA-DRB1*11:01L
  source 1..14: note = Severe acute respiratory syndrome coronavirus 2
NPNYEDLLIRKSNH

SEQ ID NO: 22140 - protein, 14 aa, Severe acute respiratory syndrome-related coronavirus
  REGION 1..14: note = Table B: HLA-DRB1*11:04L HLA-DRB1*08:01L HLA-DRB1*15:01L
  source 1..14: note = Severe acute respiratory syndrome coronavirus 2
QEFRYMNSQGLLPP

SEQ ID NO: 22141 - protein, 14 aa, Severe acute respiratory syndrome-related coronavirus
  REGION 1..14: note = Table B: HLA-DRB1*11:04L
  source 1..14: note = Severe acute respiratory syndrome coronavirus 2
EFRYMNSQGLLPPK

SEQ ID NO: 22142 - protein, 14 aa, Severe acute respiratory syndrome-related coronavirus
  REGION 1..14: note = Table B: HLA-DRB1*11:04L HLA-DRB1*08:02L
  source 1..14: note = Severe acute respiratory syndrome coronavirus 2
TEAFEKMVSLLSVL

SEQ ID NO: 22143 - protein, 13 aa, Severe acute respiratory syndrome-related coronavirus
  REGION 1..13: note = Table B: HLA-DRB1*11:04L
  source 1..13: note = Severe acute respiratory syndrome coronavirus 2
MLFTMLRKLDNDA

SEQ ID NO: 22144 - protein, 14 aa, Severe acute respiratory syndrome-related coronavirus
  REGION 1..14: note = Table B: HLA-DRB1*11:04L
  source 1..14: note = Severe acute respiratory syndrome coronavirus 2
LNNIINNARDGCVP

SEQ ID NO: 22145 - protein, 13 aa, Severe acute respiratory syndrome-related coronavirus
  REGION 1..13: note = Table B: HLA-DRB1*11:04L HLA-DRB1*11:01L
  source 1..13: note = Severe acute respiratory syndrome coronavirus 2
KGLNNLNRGMVLG

SEQ ID NO: 22146 - protein, 16 aa, Severe acute respiratory syndrome-related coronavirus
  REGION 1..16: note = Table B: HLA-DRB1*11:04L
  source 1..16: note = Severe acute respiratory syndrome coronavirus 2
KRHTFSNYQHEETIYN

SEQ ID NO: 22147 - protein, 15 aa, Severe acute respiratory syndrome-related coronavirus
  REGION 1..15: note = Table B: HLA-DRB1*11:04L HLA-DRB3*01:01L
  source 1..15: note = Severe acute respiratory syndrome coronavirus 2
FSNYQHEETIYNLLK

SEQ ID NO: 22148 - protein, 14 aa, Severe acute respiratory syndrome-related coronavirus
  REGION 1..14: note = Table B: HLA-DRB1*11:04L HLA-DRB1*08:01L HLA-DRB1*11:01L HLA-DPA1*03:01-B1*105:01L HLA-DQA1*05:05-B1*03:01L
  source 1..14: note = Severe acute respiratory syndrome coronavirus 2
PILTLTRALTAESH

SEQ ID NO: 22149 - protein, 13 aa, Severe acute respiratory syndrome-related coronavirus
  REGION 1..13: note = Table B: HLA-DRB1*11:04L
  source 1..13: note = Severe acute respiratory syndrome coronavirus 2
QMNLKYAISAKNR

SEQ ID NO: 22150 - protein, 14 aa, Severe acute respiratory syndrome-related coronavirus
  REGION 1..14: note = Table B: HLA-DRB1*11:04L HLA-DRB1*04:08L
  source 1..14: note = Severe acute respiratory syndrome coronavirus 2
GATVVIGTSKFYGG

SEQ ID NO: 22151 - protein, 13 aa, Severe acute respiratory syndrome-related coronavirus
  REGION 1..13: note = Table B: HLA-DRB1*11:04L HLA-DRB1*11:01L HLA-DRB1*16:01L
  source 1..13: note = Severe acute respiratory syndrome coronavirus 2
GGWHNMLKTVYSD

SEQ ID NO: 22152 - protein, 15 aa, Severe acute respiratory syndrome-related coronavirus
  REGION 1..15: note = Table B: HLA-DRB1*11:04L HLA-DRB1*11:01L
  source 1..15: note = Severe acute respiratory syndrome coronavirus 2
DGNKIADKYVRNLQH

SEQ ID NO: 22153 - protein, 15 aa, Severe acute respiratory syndrome-related coronavirus
  REGION 1..15: note = Table B: HLA-DRB1*11:04L HLA-DRB1*11:01L
  source 1..15: note = Severe acute respiratory syndrome coronavirus 2
GNKIADKYVRNLQHR

SEQ ID NO: 22154 - protein, 12 aa, Severe acute respiratory syndrome-related coronavirus
  REGION 1..12: note = Table B: HLA-DRB1*11:04L HLA-DRB1*14:54L
  source 1..12: note = Severe acute respiratory syndrome coronavirus 2
ADKYVRNLQHRL

SEQ ID NO: 22155 - protein, 13 aa, Severe acute respiratory syndrome-related coronavirus
  REGION 1..13: note = Table B: HLA-DRB1*11:04L HLA-DQA1*01-B1*05L
  source 1..13: note = Severe acute respiratory syndrome coronavirus 2
QGLVASIKNFKSV

SEQ ID NO: 22156 - protein, 13 aa, Severe acute respiratory syndrome-related coronavirus
  REGION 1..13: note = Table B: HLA-DRB1*11:04L HLA-DRB1*09:01L
  source 1..13: note = Severe acute respiratory syndrome coronavirus 2
VANYQKVGMQKYS

SEQ ID NO: 22157 - protein, 14 aa, Severe acute respiratory syndrome-related coronavirus
  REGION 1..14: note = Table B: HLA-DRB1*11:04L
  source 1..14: note = Severe acute respiratory syndrome coronavirus 2
EPEYFNSVCRLMKT

SEQ ID NO: 22158 - protein, 13 aa, Severe acute respiratory syndrome-related coronavirus
  REGION 1..13: note = Table B: HLA-DRB1*11:04L HLA-DRB1*11:01L HLA-DRB1*13:01L
  source 1..13: note = Severe acute respiratory syndrome coronavirus 2
REFLTRNPAWRKA

SEQ ID NO: 22159 - protein, 14 aa, Severe acute respiratory syndrome-related coronavirus
  REGION 1..14: note = Table B: HLA-DRB1*11:04L HLA-DRB1*11:01L HLA-DRB3*01:01L HLA-DRB1*15:03L
  source 1..14: note = Severe acute respiratory syndrome coronavirus 2
LTSMKYFVKIGPER

SEQ ID NO: 22160 - protein, 12 aa, Severe acute respiratory syndrome-related coronavirus
  REGION 1..12: note = Table B: HLA-DRB1*11:04L HLA-DRB1*11:01L
  source 1..12: note = Severe acute respiratory syndrome coronavirus 2
DYVYNPFMIDVQ

SEQ ID NO: 22161 - protein, 15 aa, Severe acute respiratory syndrome-related coronavirus
  REGION 1..15: note = Table B: HLA-DRB1*11:04L
  source 1..15: note = Severe acute respiratory syndrome coronavirus 2
SDKAYKIEELFYSYA

SEQ ID NO: 22162 - protein, 12 aa, Severe acute respiratory syndrome-related coronavirus
  REGION 1..12: note = Table B: HLA-DRB1*11:04L HLA-DRB1*11:01L HLA-DRB3*01:01L HLA-DPA1*01:03-B1*02:01L
  source 1..12: note = Severe acute respiratory syndrome coronavirus 2
PAFDKSAFVNLK

SEQ ID NO: 22163 - protein, 14 aa, Severe acute respiratory syndrome-related coronavirus
  REGION 1..14: note = Table B: HLA-DRB1*11:04L HLA-DRB1*11:01L
  source 1..14: note = Severe acute respiratory syndrome coronavirus 2
LGGAVCRHHANEYR

SEQ ID NO: 22164 - protein, 15 aa, Severe acute respiratory syndrome-related coronavirus
  REGION 1..15: note = Table B: HLA-DRB1*11:04L HLA-DRB1*11:01L
  source 1..15: note = Severe acute respiratory syndrome coronavirus 2
KRNIKPVPEVKILNN

SEQ ID NO: 22165 - protein, 13 aa, Severe acute respiratory syndrome-related coronavirus
  REGION 1..13: note = Table B: HLA-DRB1*11:04L HLA-DRB1*08:03L HLA-DRB1*15:01L
  source 1..13: note = Severe acute respiratory syndrome coronavirus 2
DGQVDLFRNARNG

SEQ ID NO: 22166 - protein, 13 aa, Severe acute respiratory syndrome-related coronavirus
  REGION 1..13: note = Table B: HLA-DRB1*11:04L HLA-DRB1*11:01L
  source 1..13: note = Severe acute respiratory syndrome coronavirus 2
PETYFTQSRNLQE

SEQ ID NO: 22167 - protein, 15 aa, Severe acute respiratory syndrome-related coronavirus
  REGION 1..15: note = Table B: HLA-DRB1*11:04L HLA-DRB1*08:03L
  source 1..15: note = Severe acute respiratory syndrome coronavirus 2
IGCNYLGKPREQIDG

SEQ ID NO: 22168 - protein, 11 aa, Severe acute respiratory syndrome-related coronavirus
  REGION 1..11: note = Table B: HLA-DRB1*11:04L HLA-DRB1*11:01L HLA-DQA1*05:05-B1*03:116L HLA-DPA1*01:03-B1*04:02L HLA-DRB1*10:01L HLA-DRB1*08:03L
  source 1..11: note = Severe acute respiratory syndrome coronavirus 2
IFWRNTNPIQL

SEQ ID NO: 22169 - protein, 13 aa, Severe acute respiratory syndrome-related coronavirus
  REGION 1..13: note = Table B: HLA-DRB1*11:04L HLA-DRB3*01:01L HLA-DPA1*02:01-B1*13:01L
  source 1..13: note = Severe acute respiratory syndrome coronavirus 2
KVFRSSVLHSTQD

SEQ ID NO: 22170 - protein, 13 aa, Severe acute respiratory syndrome-related coronavirus
  REGION 1..13: note = Table B: HLA-DRB1*11:04L HLA-DRB3*01:01L
  source 1..13: note = Severe acute respiratory syndrome coronavirus 2
LGVYYHKNNKSWM

SEQ ID NO: 22171 - protein, 15 aa, Severe acute respiratory syndrome-related coronavirus
  REGION 1..15: note = Table B: HLA-DRB1*11:04L HLA-DRB1*11:01L
  source 1..15: note = Severe acute respiratory syndrome coronavirus 2
GKQGNFKNLREFVFK

SEQ ID NO: 22172 - protein, 13 aa, Severe acute respiratory syndrome-related coronavirus
  REGION 1..13: note = Table B: HLA-DRB1*11:04L
  source 1..13: note = Severe acute respiratory syndrome coronavirus 2
REFVFKNIDGYFK

SEQ ID NO: 22173 - protein, 13 aa, Severe acute respiratory syndrome-related coronavirus
  REGION 1..13: note = Table B: HLA-DRB1*11:04L HLA-DPA1*01:03-B1*02:01L
  source 1..13: note = Severe acute respiratory syndrome coronavirus 2
AAAYYVGYLQPRT

SEQ ID NO: 22174 - protein, 13 aa, Severe acute respiratory syndrome-related coronavirus
  REGION 1..13: note = Table B: HLA-DRB1*11:04L HLA-DRB1*15:01L
  source 1..13: note = Severe acute respiratory syndrome coronavirus 2
AAYYVGYLQPRTF

SEQ ID NO: 22175 - protein, 14 aa, Severe acute respiratory syndrome-related coronavirus
  REGION 1..14: note = Table B: HLA-DRB1*11:04L HLA-DRB3*01:01L HLA-DRB1*07:01L
  source 1..14: note = Severe acute respiratory syndrome coronavirus 2
KSFTVEKGIYQTSN

SEQ ID NO: 22176 - protein, 15 aa, Severe acute respiratory syndrome-related coronavirus
  REGION 1..15: note = Table B: HLA-DRB1*11:04L HLA-DRB1*12:02L
  source 1..15: note = Severe acute respiratory syndrome coronavirus 2
VQPTESIVRFPNITN

SEQ ID NO: 22177 - protein, 15 aa, Severe acute respiratory syndrome-related coronavirus
  REGION 1..15: note = Table B: HLA-DRB1*11:04L
  source 1..15: note = Severe acute respiratory syndrome coronavirus 2
QPTESIVRFPNITNL

SEQ ID NO: 22178 - protein, 16 aa, Severe acute respiratory syndrome-related coronavirus
  REGION 1..16: note = Table B: HLA-DRB1*11:04L
  source 1..16: note = Severe acute respiratory syndrome coronavirus 2
SYGFQPTNGVGYQPYR

SEQ ID NO: 22179 - protein, 13 aa, Severe acute respiratory syndrome-related coronavirus
  REGION 1..13: note = Table B: HLA-DRB1*11:04L HLA-DRB1*11:01L
  source 1..13: note = Severe acute respiratory syndrome coronavirus 2
ADQLTPTWRVYST

SEQ ID NO: 22180 - protein, 14 aa, Severe acute respiratory syndrome-related coronavirus
  REGION 1..14: note = Table B: HLA-DRB1*11:04L HLA-DRB1*08:01L HLA-DPA1*01:03-B1*104:01L HLA-DRB1*10:01L
  source 1..14: note = Severe acute respiratory syndrome coronavirus 2
TEILPVSMTKTSVD

SEQ ID NO: 22181 - protein, 14 aa, Severe acute respiratory syndrome-related coronavirus
  REGION 1..14: note = Table B: HLA-DRB1*11:04L HLA-DRB1*07:01L HLA-DRB1*15:01L
  source 1..14: note = Severe acute respiratory syndrome coronavirus 2
VVIGIVNNTVYDPL

SEQ ID NO: 22182 - protein, 15 aa, Severe acute respiratory syndrome-related coronavirus
  REGION 1..15: note = Table B: HLA-DRB1*11:04L HLA-DRB1*09:01L HLA-DRB3*01:01L HLA-DRB1*10:01L
  source 1..15: note = Severe acute respiratory syndrome coronavirus 2
IGIVNNTVYDPLQPE

SEQ ID NO: 22183 - protein, 12 aa, Severe acute respiratory syndrome-related coronavirus
  REGION 1..12: note = Table B: HLA-DRB1*11:04L HLA-DRB1*11:01L HLA-DPA1*01:03-B1*02:01L
  source 1..12: note = Severe acute respiratory syndrome coronavirus 2
VFQSASKIITLK

SEQ ID NO: 22184 - protein, 15 aa, Severe acute respiratory syndrome-related coronavirus
  REGION 1..15: note = Table B: HLA-DRB1*11:04L HLA-DRB1*11:01L HLA-DRB3*01:01L
  source 1..15: note = Severe acute respiratory syndrome coronavirus 2
VYFLQSINFVRIIMR

SEQ ID NO: 22185 - protein, 14 aa, Severe acute respiratory syndrome-related coronavirus
  REGION 1..14: note = Table B: HLA-DRB1*11:04L HLA-DRB1*14:02L HLA-DRB1*15:03L
  source 1..14: note = Severe acute respiratory syndrome coronavirus 2
TSGDGTTSPISEHD

SEQ ID NO: 22186 - protein, 13 aa, Severe acute respiratory syndrome-related coronavirus
  REGION 1..13: note = Table B: HLA-DRB1*11:04L HLA-DRB1*11:01L HLA-DRB3*01:01L HLA-DPA1*01:03-B1*02:01L
  source 1..13: note = Severe acute respiratory syndrome coronavirus 2
HSYFTSDYYQLYS

SEQ ID NO: 22187 - protein, 14 aa, Severe acute respiratory syndrome-related coronavirus
  REGION 1..14: note = Table B: HLA-DRB1*11:04L HLA-DRB1*08:01L HLA-DRB1*11:01L
  source 1..14: note = Severe acute respiratory syndrome coronavirus 2
RCDIKDLPKEITVA

SEQ ID NO: 22188 - protein, 14 aa, Severe acute respiratory syndrome-related coronavirus
  REGION 1..14: note = Table B: HLA-DRB1*11:04L
  source 1..14: note = Severe acute respiratory syndrome coronavirus 2
GFAAYSRYRIGNYK

SEQ ID NO: 22189 - protein, 14 aa, Severe acute respiratory syndrome-related coronavirus
  REGION 1..14: note = Table B: HLA-DRB1*11:04L HLA-DPA1*01:03-B1*04:02L
  source 1..14: note = Severe acute respiratory syndrome coronavirus 2
LYHYQECVRGTTVL

SEQ ID NO: 22190 - protein, 17 aa, Severe acute respiratory syndrome-related coronavirus
  REGION 1..17: note = Table B: HLA-DRB1*11:04L
  source 1..17: note = Severe acute respiratory syndrome coronavirus 2
AEGSRGGSQASSRSSSR

SEQ ID NO: 22191 - protein, 16 aa, Severe acute respiratory syndrome-related coronavirus
  REGION 1..16: note = Table B: HLA-DRB1*11:04L HLA-DRB1*11:01L
  source 1..16: note = Severe acute respiratory syndrome coronavirus 2
GSRGGSQASSRSSSRS

SEQ ID NO: 22192 - protein, 15 aa, Severe acute respiratory syndrome-related coronavirus
  REGION 1..15: note = Table B: HLA-DRB1*11:04L HLA-DRB1*11:01L
  source 1..15: note = Severe acute respiratory syndrome coronavirus 2
KAYNVTQAFGRRGPE

SEQ ID NO: 22193 - protein, 17 aa, Severe acute respiratory syndrome-related coronavirus
  REGION 1..17: note = Table B: HLA-DRB1*11:04L
  source 1..17: note = Severe acute respiratory syndrome coronavirus 2
TPSGTWLTYTGAIKLDD

SEQ ID NO: 22194 - protein, 14 aa, Severe acute respiratory syndrome-related coronavirus
  REGION 1..14: note = Table B: HLA-DRB1*11:04L
  source 1..14: note = Severe acute respiratory syndrome coronavirus 2
AADLDDFSKQLQQS

SEQ ID NO: 22195 - protein, 15 aa, Severe acute respiratory syndrome-related coronavirus
  REGION 1..15: note = Table B: HLA-DRB1*14:02L HLA-DRB4*01:01L HLA-DRB1*09:01L
  source 1..15: note = Severe acute respiratory syndrome coronavirus 2
DVLVRGFGDSVEEVL

SEQ ID NO: 22196 - protein, 11 aa, Severe acute respiratory syndrome-related coronavirus
  REGION 1..11: note = Table B: HLA-DRB1*14:02L HLA-DPA1*01:03-B1*04:02L HLA-DPA1*01:03-B1*104:01L
  source 1..11: note = Severe acute respiratory syndrome coronavirus 2
VEVEKGVLPQL

SEQ ID NO: 22197 - protein, 13 aa, Severe acute respiratory syndrome-related coronavirus
  REGION 1..13: note = Table B: HLA-DRB1*14:02L HLA-DQA1*05:05-B1*03:116L HLA-DPA1*01:03-B1*04:02L HLA-DRB1*08:02L HLA-DRB1*15:03L
  source 1..13: note = Severe acute respiratory syndrome coronavirus 2
EQPYVFIKRSDAR

SEQ ID NO: 22198 - protein, 16 aa, Severe acute respiratory syndrome-related coronavirus
  REGION 1..16: note = Table B: HLA-DRB1*14:02L
  source 1..16: note = Severe acute respiratory syndrome coronavirus 2
EDFQENWNTKHSSGVT

SEQ ID NO: 22199 - protein, 18 aa, Severe acute respiratory syndrome-related coronavirus
  REGION 1..18: note = Table B: HLA-DRB1*14:02L HLA-DPA1*01:03-B1*04:02L
  source 1..18: note = Severe acute respiratory syndrome coronavirus 2
IKDLLARAGKASCTLSEQ

SEQ ID NO: 22200 - protein, 13 aa, Severe acute respiratory syndrome-related coronavirus
  REGION 1..13: note = Table B: HLA-DRB1*14:02L HLA-DQA1*05:05-B1*03:01L
  source 1..13: note = Severe acute respiratory syndrome coronavirus 2
LAEYHNESGLKTI

SEQ ID NO: 22201 - protein, 14 aa, Severe acute respiratory syndrome-related coronavirus
  REGION 1..14: note = Table B: HLA-DRB1*14:02L HLA-DPA1*02:01-B1*13:01L HLA-DPA1*01:03-B1*104:01L
  source 1..14: note = Severe acute respiratory syndrome coronavirus 2
SFSASTSAFVETVK

SEQ ID NO: 22202 - protein, 16 aa, Severe acute respiratory syndrome-related coronavirus
  REGION 1..16: note = Table B: HLA-DRB1*14:02L HLA-DPA1*02:01-B1*13:01L
  source 1..16: note = Severe acute respiratory syndrome coronavirus 2
GNFKVTKGKAKKGAWN

SEQ ID NO: 22203 - protein, 16 aa, Severe acute respiratory syndrome-related coronavirus
  REGION 1..16: note = Table B: HLA-DRB1*14:02L
  source 1..16: note = Severe acute respiratory syndrome coronavirus 2
GGVVQLTSQWLTNIFG

SEQ ID NO: 22204 - protein, 14 aa, Severe acute respiratory syndrome-related coronavirus
  REGION 1..14: note = Table B: HLA-DRB1*14:02L HLA-DRB1*08:02L
  source 1..14: note = Severe acute respiratory syndrome coronavirus 2
GGQIVTCAKEIKES

SEQ ID NO: 22205 - protein, 18 aa, Severe acute respiratory syndrome-related coronavirus
  REGION 1..18: note = Table B: HLA-DRB1*14:02L HLA-DPA1*01:03-B1*04:02L
  source 1..18: note = Severe acute respiratory syndrome coronavirus 2
VNKFLALCADSIIIGGAK

SEQ ID NO: 22206 - protein, 14 aa, Severe acute respiratory syndrome-related coronavirus
  REGION 1..14: note = Table B: HLA-DRB1*14:02L HLA-DPA1*02:01-B1*13:01L
  source 1..14: note = Severe acute respiratory syndrome coronavirus 2
IIIGGAKLKALNLG

SEQ ID NO: 22207 - protein, 16 aa, Severe acute respiratory syndrome-related coronavirus
  REGION 1..16: note = Table B: HLA-DRB1*14:02L HLA-DPA1*01:03-B1*04:02L HLA-DRB1*07:01L HLA-DRB1*15:03L
  source 1..16: note = Severe acute respiratory syndrome coronavirus 2
SKGLYRKCVKSREETG

SEQ ID NO: 22208 - protein, 13 aa, Severe acute respiratory syndrome-related coronavirus
  REGION 1..13: note = Table B: HLA-DRB1*14:02L HLA-DQA1*01-B1*05L
  source 1..13: note = Severe acute respiratory syndrome coronavirus 2
KEIIFLEGETLPT

SEQ ID NO: 22209 - protein, 13 aa, Severe acute respiratory syndrome-related coronavirus
  REGION 1..13: note = Table B: HLA-DRB1*14:02L HLA-DRB1*12:02L
  source 1..13: note = Severe acute respiratory syndrome coronavirus 2
EIIFLEGETLPTE

SEQ ID NO: 22210 - protein, 14 aa, Severe acute respiratory syndrome-related coronavirus
  REGION 1..14: note = Table B: HLA-DRB1*14:02L HLA-DPA1*02:01-B1*13:01L
  source 1..14: note = Severe acute respiratory syndrome coronavirus 2
IIFLEGETLPTEVL

SEQ ID NO: 22211 - protein, 15 aa, Severe acute respiratory syndrome-related coronavirus
  REGION 1..15: note = Table B: HLA-DRB1*14:02L
  source 1..15: note = Severe acute respiratory syndrome coronavirus 2
TEKYCALAPNMMVTN

SEQ ID NO: 22212 - protein, 14 aa, Severe acute respiratory syndrome-related coronavirus
  REGION 1..14: note = Table B: HLA-DRB1*14:02L HLA-DPA1*02:01-B1*13:01L HLA-DRB1*07:01L HLA-DRB1*10:01L
  source 1..14: note = Severe acute respiratory syndrome coronavirus 2
NTFTLKGGAPTKVT

SEQ ID NO: 22213 - protein, 14 aa, Severe acute respiratory syndrome-related coronavirus
  REGION 1..14: note = Table B: HLA-DRB1*14:02L
  source 1..14: note = Severe acute respiratory syndrome coronavirus 2
TFGDDTVIEVQGYK

SEQ ID NO: 22214 - protein, 14 aa, Severe acute respiratory syndrome-related coronavirus
  REGION 1..14: note = Table B: HLA-DRB1*14:02L HLA-DRB1*15:03L
  source 1..14: note = Severe acute respiratory syndrome coronavirus 2
SEDNQTTTIQTIVE

SEQ ID NO: 22215 - protein, 13 aa, Severe acute respiratory syndrome-related coronavirus
  REGION 1..13: note = Table B: HLA-DRB1*14:02L HLA-DRB1*08:01L HLA-DPA1*01:03-B1*104:01L
  source 1..13: note = Severe acute respiratory syndrome coronavirus 2
DIQLLKSAYENFN

SEQ ID NO: 22216 - protein, 13 aa, Severe acute respiratory syndrome-related coronavirus
  REGION 1..13: note = Table B: HLA-DRB1*14:02L
  source 1..13: note = Severe acute respiratory syndrome coronavirus 2
TLEETKFLTENLL

SEQ ID NO: 22217 - protein, 15 aa, Severe acute respiratory syndrome-related coronavirus
  REGION 1..15: note = Table B: HLA-DRB1*14:02L HLA-DRB1*08:02L
  source 1..15: note = Severe acute respiratory syndrome coronavirus 2
QRKYKGIKIQEGVVD

SEQ ID NO: 22218 - protein, 18 aa, Severe acute respiratory syndrome-related coronavirus
  REGION 1..18: note = Table B: HLA-DRB1*14:02L
  source 1..18: note = Severe acute respiratory syndrome coronavirus 2
TLLSLREVRTIKVFTTVD

SEQ ID NO: 22219 - protein, 18 aa, Severe acute respiratory syndrome-related coronavirus
  REGION 1..18: note = Table B: HLA-DRB1*14:02L
  source 1..18: note = Severe acute respiratory syndrome coronavirus 2
DPSFLGRYMSALNHTKKW

SEQ ID NO: 22220 - protein, 16 aa, Severe acute respiratory syndrome-related coronavirus
  REGION 1..16: note = Table B: HLA-DRB1*14:02L HLA-DQA1*05:05-B1*03:19L HLA-DQA1*05:01-B1*02:01L HLA-DPA1*01:03-B1*04:02L HLA-DRB1*08:02L HLA-DRB1*08:03L
  source 1..16: note = Severe acute respiratory syndrome coronavirus 2
MSALNHTKKWKYPQVN

SEQ ID NO: 22221 - protein, 16 aa, Severe acute respiratory syndrome-related coronavirus
  REGION 1..16: note = Table B: HLA-DRB1*14:02L
  source 1..16: note = Severe acute respiratory syndrome coronavirus 2
GLTSIKWADNNCYLAT

SEQ ID NO: 22222 - protein, 16 aa, Severe acute respiratory syndrome-related coronavirus
  REGION 1..16: note = Table B: HLA-DRB1*14:02L HLA-DRB1*09:01L
  source 1..16: note = Severe acute respiratory syndrome coronavirus 2
LGDVRETMSYLFQHAN

SEQ ID NO: 22223 - protein, 13 aa, Severe acute respiratory syndrome-related coronavirus
  REGION 1..13: note = Table B: HLA-DRB1*14:02L HLA-DPA1*01:03-B1*04:02L HLA-DRB1*12:01L HLA-DQA1*05:05-B1*03:01L HLA-DRB1*16:01L HLA-DQA1*01:03-B1*06:01L
  source 1..13: note = Severe acute respiratory syndrome coronavirus 2
ASEYTGNYQCGHY

SEQ ID NO: 22224 - protein, 11 aa, Severe acute respiratory syndrome-related coronavirus
  REGION 1..11: note = Table B: HLA-DRB1*14:02L HLA-DQA1*05:01-B1*02:01L HLA-DPA1*03:01-B1*105:01L HLA-DRB1*15:03L
  source 1..11: note = Severe acute respiratory syndrome coronavirus 2
YPNASFDNFKF

SEQ ID NO: 22225 - protein, 13 aa, Severe acute respiratory syndrome-related coronavirus
  REGION 1..13: note = Table B: HLA-DRB1*14:02L
  source 1..13: note = Severe acute respiratory syndrome coronavirus 2
IKFADDLNQLTGY

SEQ ID NO: 22226 - protein, 16 aa, Severe acute respiratory syndrome-related coronavirus
  REGION 1..16: note = Table B: HLA-DRB1*14:02L
  source 1..16: note = Severe acute respiratory syndrome coronavirus 2
SRELKVTFFPDLNGDV

SEQ ID NO: 22227 - protein, 16 aa, Severe acute respiratory syndrome-related coronavirus
  REGION 1..16: note = Table B: HLA-DRB1*14:02L
  source 1..16: note = Severe acute respiratory syndrome coronavirus 2
AIDYKHYTPSFKKGAK

SEQ ID NO: 22228 - protein, 15 aa, Severe acute respiratory syndrome-related coronavirus
  REGION 1..15: note = Table B: HLA-DRB1*14:02L HLA-DQA1*05:05-B1*03:116L
  source 1..15: note = Severe acute respiratory syndrome coronavirus 2
DYKHYTPSFKKGAKL

SEQ ID NO: 22229 - protein, 15 aa, Severe acute respiratory syndrome-related coronavirus
  REGION 1..15: note = Table B: HLA-DRB1*14:02L HLA-DRB1*08:03L
  source 1..15: note = Severe acute respiratory syndrome coronavirus 2
EDLKPVSEEVVENPT

SEQ ID NO: 22230 - protein, 14 aa, Severe acute respiratory syndrome-related coronavirus
  REGION 1..14: note = Table B: HLA-DRB1*14:02L
  source 1..14: note = Severe acute respiratory syndrome coronavirus 2
ASFYYVWKSYVHVV

SEQ ID NO: 22231 - protein, 12 aa, Severe acute respiratory syndrome-related coronavirus
  REGION 1..12: note = Table B: HLA-DRB1*14:02L
  source 1..12: note = Severe acute respiratory syndrome coronavirus 2
QSSYIVDSVTVK

SEQ ID NO: 22232 - protein, 13 aa, Severe acute respiratory syndrome-related coronavirus
  REGION 1..13: note = Table B: HLA-DRB1*14:02L HLA-DRB1*15:03L
  source 1..13: note = Severe acute respiratory syndrome coronavirus 2
ILLLDQALVSDVG

SEQ ID NO: 22233 - protein, 17 aa, Severe acute respiratory syndrome-related coronavirus
  REGION 1..17: note = Table B: HLA-DRB1*14:02L HLA-DPA1*01:03-B1*04:02L
  source 1..17: note = Severe acute respiratory syndrome coronavirus 2
VPMEKLKTLVATAEAEL

SEQ ID NO: 22234 - protein, 11 aa, Severe acute respiratory syndrome-related coronavirus
  REGION 1..11: note = Table B: HLA-DRB1*14:02L HLA-DQA1*05:05-B1*03:19L HLA-DQA1*01:03-B1*06:01L
  source 1..11: note = Severe acute respiratory syndrome coronavirus 2
FVDSDVETKDV

SEQ ID NO: 22235 - protein, 14 aa, Severe acute respiratory syndrome-related coronavirus
  REGION 1..14: note = Table B: HLA-DRB1*14:02L
  source 1..14: note = Severe acute respiratory syndrome coronavirus 2
NNYMLTYNKVENMT

SEQ ID NO: 22236 - protein, 17 aa, Severe acute respiratory syndrome-related coronavirus
  REGION 1..17: note = Table B: HLA-DRB1*14:02L HLA-DQA1*05:05-B1*03:19L HLA-DQA1*05:05-B1*03:116L HLA-DPA1*01:03-B1*04:02L
  source 1..17: note = Severe acute respiratory syndrome coronavirus 2
LRKQIRSAAKKNNLPFK

SEQ ID NO: 22237 - protein, 16 aa, Severe acute respiratory syndrome-related coronavirus
  REGION 1..16: note = Table B: HLA-DRB1*14:02L HLA-DQA1*05:05-B1*03:19L HLA-DQA1*05:05-B1*03:01L HLA-DRB1*08:02L
  source 1..16: note = Severe acute respiratory syndrome coronavirus 2
GGKIVNNWLKQLIKVT

SEQ ID NO: 22238 - protein, 11 aa, Severe acute respiratory syndrome-related coronavirus
  REGION 1..11: note = Table B: HLA-DRB1*14:02L HLA-DQA1*02:01-B1*03:03L
  source 1..11: note = Severe acute respiratory syndrome coronavirus 2
RVFSAVGNICY

SEQ ID NO: 22239 - protein, 14 aa, Severe acute respiratory syndrome-related coronavirus
  REGION 1..14: note = Table B: HLA-DRB1*14:02L
  source 1..14: note = Severe acute respiratory syndrome coronavirus 2
SGRWVLNNDYYRSL

SEQ ID NO: 22240 - protein, 16 aa, Severe acute respiratory syndrome-related coronavirus
  REGION 1..16: note = Table B: HLA-DRB1*14:02L HLA-DPA1*01:03-B1*104:01L
  source 1..16: note = Severe acute respiratory syndrome coronavirus 2
AVNLLTNMFTPLIQPI

SEQ ID NO: 22241 - protein, 18 aa, Severe acute respiratory syndrome-related coronavirus
  REGION 1..18: note = Table B: HLA-DRB1*14:02L HLA-DPA1*01:03-B1*104:01L
  source 1..18: note = Severe acute respiratory syndrome coronavirus 2
QPIGALDISASIVAGGIV

SEQ ID NO: 22242 - protein, 18 aa, Severe acute respiratory syndrome-related coronavirus
  REGION 1..18: note = Table B: HLA-DRB1*14:02L
  source 1..18: note = Severe acute respiratory syndrome coronavirus 2
NKEMYLKLRSDVLLPLTQ

SEQ ID NO: 22243 - protein, 16 aa, Severe acute respiratory syndrome-related coronavirus
  REGION 1..16: note = Table B: HLA-DRB1*14:02L
  source 1..16: note = Severe acute respiratory syndrome coronavirus 2
LAKALNDFSNSGSDVL

SEQ ID NO: 22244 - protein, 18 aa, Severe acute respiratory syndrome-related coronavirus
  REGION 1..18: note = Table B: HLA-DRB1*14:02L
  source 1..18: note = Severe acute respiratory syndrome coronavirus 2
ALNDFSNSGSDVLYQPPQ

SEQ ID NO: 22245 - protein, 17 aa, Severe acute respiratory syndrome-related coronavirus
  REGION 1..17: note = Table B: HLA-DRB1*14:02L
  source 1..17: note = Severe acute respiratory syndrome coronavirus 2
VGFNIDYDCVSFCYMHH

SEQ ID NO: 22246 - protein, 16 aa, Severe acute respiratory syndrome-related coronavirus
  REGION 1..16: note = Table B: HLA-DRB1*14:02L
  source 1..16: note = Severe acute respiratory syndrome coronavirus 2
NIDYDCVSFCYMHHME

SEQ ID NO: 22247 - protein, 16 aa, Severe acute respiratory syndrome-related coronavirus
  REGION 1..16: note = Table B: HLA-DRB1*14:02L
  source 1..16: note = Severe acute respiratory syndrome coronavirus 2
NGRTILGSALLEDEFT

SEQ ID NO: 22248 - protein, 16 aa, Severe acute respiratory syndrome-related coronavirus
  REGION 1..16: note = Table B: HLA-DRB1*14:02L
  source 1..16: note = Severe acute respiratory syndrome coronavirus 2
GRTILGSALLEDEFTP

SEQ ID NO: 22249 - protein, 14 aa, Severe acute respiratory syndrome-related coronavirus
  REGION 1..14: note = Table B: HLA-DRB1*14:02L HLA-DRB1*08:01L HLA-DRB4*01:01L HLA-DRB1*04:10L HLA-DQA1*05:05-B1*03:01L HLA-DRB1*08:03L
  source 1..14: note = Severe acute respiratory syndrome coronavirus 2
SALLEDEFTPFDVV

SEQ ID NO: 22250 - protein, 19 aa, Severe acute respiratory syndrome-related coronavirus
  REGION 1..19: note = Table B: HLA-DRB1*14:02L HLA-DPA1*01:03-B1*04:02L
  source 1..19: note = Severe acute respiratory syndrome coronavirus 2
TPFDVVRQCSGVTFQSAVK

SEQ ID NO: 22251 - protein, 14 aa, Severe acute respiratory syndrome-related coronavirus
  REGION 1..14: note = Table B: HLA-DRB1*14:02L HLA-DPA1*01:03-B1*04:02L
  source 1..14: note = Severe acute respiratory syndrome coronavirus 2
YFNMVYMPASWVMR

SEQ ID NO: 22252 - protein, 13 aa, Severe acute respiratory syndrome-related coronavirus
  REGION 1..13: note = Table B: HLA-DRB1*14:02L HLA-DQA1*01-B1*05L HLA-DQA1*05:05-B1*03:19L HLA-DQA1*05:05-B1*03:01L
  source 1..13: note = Severe acute respiratory syndrome coronavirus 2
LQQLRVESSSKLW

SEQ ID NO: 22253 - protein, 18 aa, Severe acute respiratory syndrome-related coronavirus
  REGION 1..18: note = Table B: HLA-DRB1*14:02L
  source 1..18: note = Severe acute respiratory syndrome coronavirus 2
VDINKLCEEMLDNRATLQ

SEQ ID NO: 22254 - protein, 12 aa, Severe acute respiratory syndrome-related coronavirus
  REGION 1..12: note = Table B: HLA-DRB1*14:02L
  source 1..12: note = Severe acute respiratory syndrome coronavirus 2
EFDRDAAMQRKL

SEQ ID NO: 22255 - protein, 18 aa, Severe acute respiratory syndrome-related coronavirus
  REGION 1..18: note = Table B: HLA-DRB1*14:02L HLA-DPA1*01:03-B1*104:01L
  source 1..18: note = Severe acute respiratory syndrome coronavirus 2
VTSAMQTMLFTMLRKLDN

SEQ ID NO: 22256 - protein, 15 aa, Severe acute respiratory syndrome-related coronavirus
  REGION 1..15: note = Table B: HLA-DRB1*14:02L
  source 1..15: note = Severe acute respiratory syndrome coronavirus 2
QTMLFTMLRKLDNDA

SEQ ID NO: 22257 - protein, 16 aa, Severe acute respiratory syndrome-related coronavirus
  REGION 1..16: note = Table B: HLA-DRB1*14:02L HLA-DRB1*11:01L HLA-DQA1*05:05-B1*03:19L
  source 1..16: note = Severe acute respiratory syndrome coronavirus 2
GGRFVLALLSDLQDLK

SEQ ID NO: 22258 - protein, 16 aa, Severe acute respiratory syndrome-related coronavirus
  REGION 1..16: note = Table B: HLA-DRB1*14:02L HLA-DPA1*01:03-B1*104:01L
  source 1..16: note = Severe acute respiratory syndrome coronavirus 2
LSDLQDLKWARFPKSD

SEQ ID NO: 22259 - protein, 13 aa, Severe acute respiratory syndrome-related coronavirus
  REGION 1..13: note = Table B: HLA-DRB1*14:02L
  source 1..13: note = Severe acute respiratory syndrome coronavirus 2
GTIYTELEPPCRF

SEQ ID NO: 22260 - protein, 14 aa, Severe acute respiratory syndrome-related coronavirus
  REGION 1..14: note = Table B: HLA-DRB1*14:02L HLA-DPA1*02:01-B1*13:01L
  source 1..14: note = Severe acute respiratory syndrome coronavirus 2
YFIKGLNNLNRGMV

SEQ ID NO: 22261 - protein, 14 aa, Severe acute respiratory syndrome-related coronavirus
  REGION 1..14: note = Table B: HLA-DRB1*14:02L
  source 1..14: note = Severe acute respiratory syndrome coronavirus 2
GMVLGSLAATVRLQ

SEQ ID NO: 22262 - protein, 16 aa, Severe acute respiratory syndrome-related coronavirus
  REGION 1..16: note = Table B: HLA-DRB1*14:02L HLA-DQA1*05:05-B1*03:19L HLA-DQA1*05:05-B1*03:116L HLA-DPA1*01:03-B1*04:02L HLA-DRB1*12:01L HLA-DPA1*03:01-B1*105:01L HLA-DQA1*05:05-B1*03:01L HLA-DRB1*16:01L HLA-DRB1*08:02L
  source 1..16: note = Severe acute respiratory syndrome coronavirus 2
GQPITNCVKMLCTHTG

SEQ ID NO: 22263 - protein, 19 aa, Severe acute respiratory syndrome-related coronavirus
  REGION 1..19: note = Table B: HLA-DRB1*14:02L HLA-DPA1*03:01-B1*105:01L
  source 1..19: note = Severe acute respiratory syndrome coronavirus 2
PNPKGFCDLKGKYVQIPTT

SEQ ID NO: 22264 - protein, 17 aa, Severe acute respiratory syndrome-related coronavirus
  REGION 1..17: note = Table B: HLA-DRB1*14:02L
  source 1..17: note = Severe acute respiratory syndrome coronavirus 2
DEDDNLIDSYFVVKRHT

SEQ ID NO: 22265 - protein, 13 aa, Severe acute respiratory syndrome-related coronavirus
  REGION 1..13: note = Table B: HLA-DRB1*14:02L HLA-DPA1*01:03-B1*04:02L HLA-DPA1*01:03-B1*02:01L HLA-DRB1*08:02L
  source 1..13: note = Severe acute respiratory syndrome coronavirus 2
IDSYFVVKRHTFS

SEQ ID NO: 22266 - protein, 16 aa, Severe acute respiratory syndrome-related coronavirus
  REGION 1..16: note = Table B: HLA-DRB1*14:02L HLA-DPA1*01:03-B1*104:01L
  source 1..16: note = Severe acute respiratory syndrome coronavirus 2
IYNLLKDCPAVAKHDF

SEQ ID NO: 22267 - protein, 16 aa, Severe acute respiratory syndrome-related coronavirus
  REGION 1..16: note = Table B: HLA-DRB1*14:02L HLA-DQA1*05:05-B1*03:19L HLA-DQA1*05:05-B1*03:01L
  source 1..16: note = Severe acute respiratory syndrome coronavirus 2
YNLLKDCPAVAKHDFF

SEQ ID NO: 22268 - protein, 16 aa, Severe acute respiratory syndrome-related coronavirus
  REGION 1..16: note = Table B: HLA-DRB1*14:02L
  source 1..16: note = Severe acute respiratory syndrome coronavirus 2
VDSYYSLLMPILTLTR

SEQ ID NO: 22269 - protein, 16 aa, Severe acute respiratory syndrome-related coronavirus
  REGION 1..16: note = Table B: HLA-DRB1*14:02L
  source 1..16: note = Severe acute respiratory syndrome coronavirus 2
ILTLTRALTAESHVDT

SEQ ID NO: 22270 - protein, 15 aa, Severe acute respiratory syndrome-related coronavirus
  REGION 1..15: note = Table B: HLA-DRB1*14:02L HLA-DRB1*11:01L HLA-DQA1*05:01-B1*02:01L
  source 1..15: note = Severe acute respiratory syndrome coronavirus 2
TKPYIKWDLLKYDFT

SEQ ID NO: 22271 - protein, 16 aa, Severe acute respiratory syndrome-related coronavirus
  REGION 1..16: note = Table B: HLA-DRB1*14:02L HLA-DPA1*01:03-B1*104:01L HLA-DRB1*08:03L
  source 1..16: note = Severe acute respiratory syndrome coronavirus 2
KPYIKWDLLKYDFTEE

SEQ ID NO: 22272 - protein, 14 aa, Severe acute respiratory syndrome-related coronavirus
  REGION 1..14: note = Table B: HLA-DRB1*14:02L HLA-DRB1*15:01L
  source 1..14: note = Severe acute respiratory syndrome coronavirus 2
PAMHAASGNLLLDK

SEQ ID NO: 22273 - protein, 13 aa, Severe acute respiratory syndrome-related coronavirus
  REGION 1..13: note = Table B: HLA-DRB1*14:02L HLA-DPA1*01:03-B1*04:01L HLA-DPA1*01:03-B1*02:01L HLA-DPA1*01:03-B1*104:01L HLA-DRB1*07:01L
  source 1..13: note = Severe acute respiratory syndrome coronavirus 2
YYRYNLPTMCDIR

SEQ ID NO: 22274 - protein, 16 aa, Severe acute respiratory syndrome-related coronavirus
  REGION 1..16: note = Table B: HLA-DRB1*14:02L HLA-DRB3*01:01L HLA-DPA1*01:03-B1*104:01L
  source 1..16: note = Severe acute respiratory syndrome coronavirus 2
KARLYYDSMSYEDQDA

SEQ ID NO: 22275 - protein, 16 aa, Severe acute respiratory syndrome-related coronavirus
  REGION 1..16: note = Table B: HLA-DRB1*14:02L HLA-DPA1*01:03-B1*104:01L
  source 1..16: note = Severe acute respiratory syndrome coronavirus 2
ARLYYDSMSYEDQDAL

SEQ ID NO: 22276 - protein, 18 aa, Severe acute respiratory syndrome-related coronavirus
  REGION 1..18: note = Table B: HLA-DRB1*14:02L
  source 1..18: note = Severe acute respiratory syndrome coronavirus 2
VIPTITQMNLKYAISAKN

SEQ ID NO: 22277 - protein, 18 aa, Severe acute respiratory syndrome-related coronavirus
  REGION 1..18: note = Table B: HLA-DRB1*14:02L
  source 1..18: note = Severe acute respiratory syndrome coronavirus 2
IPTITQMNLKYAISAKNR

SEQ ID NO: 22278 - protein, 13 aa, Severe acute respiratory syndrome-related coronavirus
  REGION 1..13: note = Table B: HLA-DRB1*14:02L HLA-DQA1*05:05-B1*03:116L HLA-DPA1*01:03-B1*04:02L HLA-DPA1*01:03-B1*02:01L HLA-DRB1*08:02L
  source 1..13: note = Severe acute respiratory syndrome coronavirus 2
NLKYAISAKNRAR

SEQ ID NO: 22279 - protein, 18 aa, Severe acute respiratory syndrome-related coronavirus
  REGION 1..18: note = Table B: HLA-DRB1*14:02L
  source 1..18: note = Severe acute respiratory syndrome coronavirus 2
TNRQFHQKLLKSIAATRG

SEQ ID NO: 22280 - protein, 17 aa, Severe acute respiratory syndrome-related coronavirus
  REGION 1..17: note = Table B: HLA-DRB1*14:02L
  source 1..17: note = Severe acute respiratory syndrome coronavirus 2
SHRFYRLANECAQVLSE

SEQ ID NO: 22281 - protein, 16 aa, Severe acute respiratory syndrome-related coronavirus
  REGION 1..16: note = Table B: HLA-DRB1*14:02L HLA-DQA1*05:01-B1*02:01L HLA-DPA1*03:01-B1*105:01L
  source 1..16: note = Severe acute respiratory syndrome coronavirus 2
GSLYVKPGGTSSGDAT

SEQ ID NO: 22282 - protein, 14 aa, Severe acute respiratory syndrome-related coronavirus
  REGION 1..14: note = Table B: HLA-DRB1*14:02L HLA-DRB1*08:02L
  source 1..14: note = Severe acute respiratory syndrome coronavirus 2
NEFYAYLRKHFSMM

SEQ ID NO: 22283 - protein, 11 aa, Severe acute respiratory syndrome-related coronavirus
  REGION 1..11: note = Table B: HLA-DRB1*14:02L HLA-DQA1*05:05-B1*03:116L HLA-DPA1*01:03-B1*04:02L HLA-DPA1*03:01-B1*105:01L HLA-DQA1*01:03-B1*06:01L HLA-DRB1*08:02L
  source 1..11: note = Severe acute respiratory syndrome coronavirus 2
ETDLTKGPHEF

SEQ ID NO: 22284 - protein, 16 aa, Severe acute respiratory syndrome-related coronavirus
  REGION 1..16: note = Table B: HLA-DRB1*14:02L HLA-DPA1*01:03-B1*04:01L
  source 1..16: note = Severe acute respiratory syndrome coronavirus 2
FVSLAIDAYPLTKHPN

SEQ ID NO: 22285 - protein, 16 aa, Severe acute respiratory syndrome-related coronavirus
  REGION 1..16: note = Table B: HLA-DRB1*14:02L
  source 1..16: note = Severe acute respiratory syndrome coronavirus 2
ADVFHLYLQYIRKLHD

SEQ ID NO: 22286 - protein, 16 aa, Severe acute respiratory syndrome-related coronavirus
  REGION 1..16: note = Table B: HLA-DRB1*14:02L
  source 1..16: note = Severe acute respiratory syndrome coronavirus 2
VFHLYLQYIRKLHDEL

SEQ ID NO: 22287 - protein, 16 aa, Severe acute respiratory syndrome-related coronavirus
  REGION 1..16: note = Table B: HLA-DRB1*14:02L
  source 1..16: note = Severe acute respiratory syndrome coronavirus 2
LGGMSYYCKSHKPPIS

SEQ ID NO: 22288 - protein, 14 aa, Severe acute respiratory syndrome-related coronavirus
  REGION 1..14: note = Table B: HLA-DRB1*14:02L HLA-DRB1*08:01L HLA-DRB1*11:01L
  source 1..14: note = Severe acute respiratory syndrome coronavirus 2
ETFKLSYGIATVRE

SEQ ID NO: 22289 - protein, 18 aa, Severe acute respiratory syndrome-related coronavirus
  REGION 1..18: note = Table B: HLA-DRB1*14:02L
  source 1..18: note = Severe acute respiratory syndrome coronavirus 2
FKLSYGIATVREVLSDRE

SEQ ID NO: 22290 - protein, 18 aa, Severe acute respiratory syndrome-related coronavirus
  REGION 1..18: note = Table B: HLA-DRB1*14:02L
  source 1..18: note = Severe acute respiratory syndrome coronavirus 2
SDRELHLSWEVGKPRPPL

SEQ ID NO: 22291 - protein, 18 aa, Severe acute respiratory syndrome-related coronavirus
  REGION 1..18: note = Table B: HLA-DRB1*14:02L
  source 1..18: note = Severe acute respiratory syndrome coronavirus 2
DRELHLSWEVGKPRPPLN

SEQ ID NO: 22292 - protein, 16 aa, Severe acute respiratory syndrome-related coronavirus
  REGION 1..16: note = Table B: HLA-DRB1*14:02L HLA-DPA1*01:03-B1*04:02L
  source 1..16: note = Severe acute respiratory syndrome coronavirus 2
YVRITGLYPTLNISDE

SEQ ID NO: 22293 - protein, 16 aa, Severe acute respiratory syndrome-related coronavirus
  REGION 1..16: note = Table B: HLA-DRB1*14:02L
  source 1..16: note = Severe acute respiratory syndrome coronavirus 2
EKALKYLPIDKCSRII

SEQ ID NO: 22294 - protein, 16 aa, Severe acute respiratory syndrome-related coronavirus
  REGION 1..16: note = Table B: HLA-DRB1*14:02L
  source 1..16: note = Severe acute respiratory syndrome coronavirus 2
KALKYLPIDKCSRIIP

SEQ ID NO: 22295 - protein, 16 aa, Severe acute respiratory syndrome-related coronavirus
  REGION 1..16: note = Table B: HLA-DRB1*14:02L HLA-DQA1*05:05-B1*03:19L
  source 1..16: note = Severe acute respiratory syndrome coronavirus 2
EPEYFNSVCRLMKTIG

SEQ ID NO: 22296 - protein, 11 aa, Severe acute respiratory syndrome-related coronavirus
  REGION 1..11: note = Table B: HLA-DRB1*14:02L
  source 1..11: note = Severe acute respiratory syndrome coronavirus 2
RLMKTIGPDMF

SEQ ID NO: 22297 - protein, 16 aa, Severe acute respiratory syndrome-related coronavirus
  REGION 1..16: note = Table B: HLA-DRB1*14:02L
  source 1..16: note = Severe acute respiratory syndrome coronavirus 2
KLQFTSLEIPRRNVAT

SEQ ID NO: 22298 - protein, 16 aa, Severe acute respiratory syndrome-related coronavirus
  REGION 1..16: note = Table B: HLA-DRB1*14:02L HLA-DRB1*11:01L HLA-DQA1*05:01-B1*02:01L HLA-DPA1*01:03-B1*104:01L
  source 1..16: note = Severe acute respiratory syndrome coronavirus 2
IGFDVEGCHATREAVG

SEQ ID NO: 22299 - protein, 16 aa, Severe acute respiratory syndrome-related coronavirus
  REGION 1..16: note = Table B: HLA-DRB1*14:02L
  source 1..16: note = Severe acute respiratory syndrome coronavirus 2
IKIVQMLSDTLKNLSD

SEQ ID NO: 22300 - protein, 17 aa, Severe acute respiratory syndrome-related coronavirus
  REGION 1..17: note = Table B: HLA-DRB1*14:02L HLA-DQA1*05:05-B1*03:19L
  source 1..17: note = Severe acute respiratory syndrome coronavirus 2
IVQMLSDTLKNLSDRVV

SEQ ID NO: 22301 - protein, 15 aa, Severe acute respiratory syndrome-related coronavirus
  REGION 1..15: note = Table B: HLA-DRB1*14:02L HLA-DPA1*01:03-B1*04:02L
  source 1..15: note = Severe acute respiratory syndrome coronavirus 2
IDVQQWGFTGNLQSN

SEQ ID NO: 22302 - protein, 16 aa, Severe acute respiratory syndrome-related coronavirus
  REGION 1..16: note = Table B: HLA-DRB1*14:02L
  source 1..16: note = Severe acute respiratory syndrome coronavirus 2
DELKINAACRKVQHMV

SEQ ID NO: 22303 - protein, 16 aa, Severe acute respiratory syndrome-related coronavirus
  REGION 1..16: note = Table B: HLA-DRB1*14:02L
  source 1..16: note = Severe acute respiratory syndrome coronavirus 2
EYRLYLDAYNMMISAG

SEQ ID NO: 22304 - protein, 14 aa, Severe acute respiratory syndrome-related coronavirus
  REGION 1..14: note = Table B: HLA-DRB1*14:02L
  source 1..14: note = Severe acute respiratory syndrome coronavirus 2
YKQFDTYNLWNTFT

SEQ ID NO: 22305 - protein, 13 aa, Severe acute respiratory syndrome-related coronavirus
  REGION 1..13: note = Table B: HLA-DRB1*14:02L HLA-DRB4*01:01L HLA-DRB1*09:01L HLA-DRB3*01:01L HLA-DPA1*01:03-B1*104:01L HLA-DRB1*07:01L HLA-DRB1*08:02L
  source 1..13: note = Severe acute respiratory syndrome coronavirus 2
NTFTRLQSLENVA

SEQ ID NO: 22306 - protein, 13 aa, Severe acute respiratory syndrome-related coronavirus
  REGION 1..13: note = Table B: HLA-DRB1*14:02L
  source 1..13: note = Severe acute respiratory syndrome coronavirus 2
LENVAFNVVNKGH

SEQ ID NO: 22307 - protein, 12 aa, Severe acute respiratory syndrome-related coronavirus
  REGION 1..12: note = Table B: HLA-DRB1*14:02L
  source 1..12: note = Severe acute respiratory syndrome coronavirus 2
SIINNTVYTKVD

SEQ ID NO: 22308 - protein, 13 aa, Severe acute respiratory syndrome-related coronavirus
  REGION 1..13: note = Table B: HLA-DRB1*14:02L
  source 1..13: note = Severe acute respiratory syndrome coronavirus 2
GVDIAANTVIWDY

SEQ ID NO: 22309 - protein, 15 aa, Severe acute respiratory syndrome-related coronavirus
  REGION 1..15: note = Table B: HLA-DRB1*14:02L
  source 1..15: note = Severe acute respiratory syndrome coronavirus 2
DGQVDLFRNARNGVL

SEQ ID NO: 22310 - protein, 14 aa, Severe acute respiratory syndrome-related coronavirus
  REGION 1..14: note = Table B: HLA-DRB1*14:02L HLA-DPA1*01:03-B1*04:02L
  source 1..14: note = Severe acute respiratory syndrome coronavirus 2
EFIERYKLEGYAFE

SEQ ID NO: 22311 - protein, 15 aa, Severe acute respiratory syndrome-related coronavirus
  REGION 1..15: note = Table B: HLA-DRB1*14:02L HLA-DQA1*05:05-B1*03:01L
  source 1..15: note = Severe acute respiratory syndrome coronavirus 2
IERYKLEGYAFEHIV

SEQ ID NO: 22312 - protein, 14 aa, Severe acute respiratory syndrome-related coronavirus
  REGION 1..14: note = Table B: HLA-DRB1*14:02L
  source 1..14: note = Severe acute respiratory syndrome coronavirus 2
LLLDDFVEIIKSQD

SEQ ID NO: 22313 - protein, 16 aa, Severe acute respiratory syndrome-related coronavirus
  REGION 1..16: note = Table B: HLA-DRB1*14:02L
  source 1..16: note = Severe acute respiratory syndrome coronavirus 2
SQDLSVVSKVVKVTID

SEQ ID NO: 22314 - protein, 18 aa, Severe acute respiratory syndrome-related coronavirus
  REGION 1..18: note = Table B: HLA-DRB1*14:02L HLA-DQA1*05:05-B1*03:01L
  source 1..18: note = Severe acute respiratory syndrome coronavirus 2
IDYTEISFMLWCKDGHVE

SEQ ID NO: 22315 - protein, 18 aa, Severe acute respiratory syndrome-related coronavirus
  REGION 1..18: note = Table B: HLA-DRB1*14:02L
  source 1..18: note = Severe acute respiratory syndrome coronavirus 2
ISFMLWCKDGHVETFYPK

SEQ ID NO: 22316 - protein, 16 aa, Severe acute respiratory syndrome-related coronavirus
  REGION 1..16: note = Table B: HLA-DRB1*14:02L HLA-DRB1*08:02L
  source 1..16: note = Severe acute respiratory syndrome coronavirus 2
DGHVETFYPKLQSSQA

SEQ ID NO: 22317 - protein, 14 aa, Severe acute respiratory syndrome-related coronavirus
  REGION 1..14: note = Table B: HLA-DRB1*14:02L HLA-DQA1*01:03-B1*06:01L
  source 1..14: note = Severe acute respiratory syndrome coronavirus 2
VAKYTQLCQYLNTL

SEQ ID NO: 22318 - protein, 17 aa, Severe acute respiratory syndrome-related coronavirus
  REGION 1..17: note = Table B: HLA-DRB1*14:02L HLA-DPA1*01:03-B1*04:01L HLA-DRB1*08:03L
  source 1..17: note = Severe acute respiratory syndrome coronavirus 2
VPYNMRVIHFGAGSDKG

SEQ ID NO: 22319 - protein, 16 aa, Severe acute respiratory syndrome-related coronavirus
  REGION 1..16: note = Table B: HLA-DRB1*14:02L
  source 1..16: note = Severe acute respiratory syndrome coronavirus 2
KLALGGSVAIKITEHS

SEQ ID NO: 22320 - protein, 16 aa, Severe acute respiratory syndrome-related coronavirus
  REGION 1..16: note = Table B: HLA-DRB1*14:02L
  source 1..16: note = Severe acute respiratory syndrome coronavirus 2
SEAFLIGCNYLGKPRE

SEQ ID NO: 22321 - protein, 15 aa, Severe acute respiratory syndrome-related coronavirus
  REGION 1..15: note = Table B: HLA-DRB1*14:02L
  source 1..15: note = Severe acute respiratory syndrome coronavirus 2
INDMILSLLSKGRLI

SEQ ID NO: 22322 - protein, 16 aa, Severe acute respiratory syndrome-related coronavirus
  REGION 1..16: note = Table B: HLA-DRB1*14:02L
  source 1..16: note = Severe acute respiratory syndrome coronavirus 2
NDMILSLLSKGRLIIR

SEQ ID NO: 22323 - protein, 17 aa, Severe acute respiratory syndrome-related coronavirus
  REGION 1..17: note = Table B: HLA-DRB1*14:02L
  source 1..17: note = Severe acute respiratory syndrome coronavirus 2
DMILSLLSKGRLIIREN

SEQ ID NO: 22324 - protein, 11 aa, Severe acute respiratory syndrome-related coronavirus
  REGION 1..11: note = Table B: HLA-DRB1*14:02L HLA-DQA1*05:05-B1*03:19L HLA-DPA1*01:03-B1*04:01L HLA-DPA1*01:03-B1*04:02L HLA-DPA1*03:01-B1*105:01L HLA-DQA1*02:01-B1*03:03L
  source 1..11: note = Severe acute respiratory syndrome coronavirus 2
RVYSSANNCTF

SEQ ID NO: 22325 - protein, 13 aa, Severe acute respiratory syndrome-related coronavirus
  REGION 1..13: note = Table B: HLA-DRB1*14:02L
  source 1..13: note = Severe acute respiratory syndrome coronavirus 2
ALEPLVDLPIGIN

SEQ ID NO: 22326 - protein, 16 aa, Severe acute respiratory syndrome-related coronavirus
  REGION 1..16: note = Table B: HLA-DRB1*14:02L
  source 1..16: note = Severe acute respiratory syndrome coronavirus 2
GINITRFQTLLALHRS

SEQ ID NO: 22327 - protein, 15 aa, Severe acute respiratory syndrome-related coronavirus
  REGION 1..15: note = Table B: HLA-DRB1*14:02L
  source 1..15: note = Severe acute respiratory syndrome coronavirus 2
ITRFQTLLALHRSYL

SEQ ID NO: 22328 - protein, 16 aa, Severe acute respiratory syndrome-related coronavirus
  REGION 1..16: note = Table B: HLA-DRB1*14:02L
  source 1..16: note = Severe acute respiratory syndrome coronavirus 2
SFSTFKCYGVSPTKLN

SEQ ID NO: 22329 - protein, 16 aa, Severe acute respiratory syndrome-related coronavirus
  REGION 1..16: note = Table B: HLA-DRB1*14:02L
  source 1..16: note = Severe acute respiratory syndrome coronavirus 2
FSTFKCYGVSPTKLND

SEQ ID NO: 22330 - protein, 15 aa, Severe acute respiratory syndrome-related coronavirus
  REGION 1..15: note = Table B: HLA-DRB1*14:02L
  source 1..15: note = Severe acute respiratory syndrome coronavirus 2
STNLVKNKCVNFNFN

SEQ ID NO: 22331 - protein, 14 aa, Severe acute respiratory syndrome-related coronavirus
  REGION 1..14: note = Table B: HLA-DRB1*14:02L
  source 1..14: note = Severe acute respiratory syndrome coronavirus 2
NFNFNGLTGTGVLT

SEQ ID NO: 22332 - protein, 15 aa, Severe acute respiratory syndrome-related coronavirus
  REGION 1..15: note = Table B: HLA-DRB1*14:02L HLA-DRB1*07:01L
  source 1..15: note = Severe acute respiratory syndrome coronavirus 2
NKKFLPFQQFGRDIA

SEQ ID NO: 22333 - protein, 16 aa, Severe acute respiratory syndrome-related coronavirus
  REGION 1..16: note = Table B: HLA-DRB1*14:02L
  source 1..16: note = Severe acute respiratory syndrome coronavirus 2
KKFLPFQQFGRDIADT

SEQ ID NO: 22334 - protein, 16 aa, Severe acute respiratory syndrome-related coronavirus
  REGION 1..16: note = Table B: HLA-DRB1*14:02L HLA-DPA1*01:03-B1*04:02L
  source 1..16: note = Severe acute respiratory syndrome coronavirus 2
SNVFQTRAGCLIGAEH

SEQ ID NO: 22335 - protein, 15 aa, Severe acute respiratory syndrome-related coronavirus
  REGION 1..15: note = Table B: HLA-DRB1*14:02L
  source 1..15: note = Severe acute respiratory syndrome coronavirus 2
SNLLLQYGSFCTQLN

SEQ ID NO: 22336 - protein, 18 aa, Severe acute respiratory syndrome-related coronavirus
  REGION 1..18: note = Table B: HLA-DRB1*14:02L HLA-DPA1*01:03-B1*04:01L HLA-DPA1*01:03-B1*04:02L HLA-DPA1*01:03-B1*104:01L
  source 1..18: note = Severe acute respiratory syndrome coronavirus 2
TPPIKDFGGFNFSQILPD

SEQ ID NO: 22337 - protein, 15 aa, Severe acute respiratory syndrome-related coronavirus
  REGION 1..15: note = Table B: HLA-DRB1*14:02L HLA-DRB1*07:01L
  source 1..15: note = Severe acute respiratory syndrome coronavirus 2
QTYVTQQLIRAAEIR

SEQ ID NO: 22338 - protein, 15 aa, Severe acute respiratory syndrome-related coronavirus
  REGION 1..15: note = Table B: HLA-DRB1*14:02L HLA-DRB1*11:01L HLA-DPA1*01:02-B1*04:01L
  source 1..15: note = Severe acute respiratory syndrome coronavirus 2
VTQQLIRAAEIRASA

SEQ ID NO: 22339 - protein, 11 aa, Severe acute respiratory syndrome-related coronavirus
  REGION 1..11: note = Table B: HLA-DRB1*14:02L
  source 1..11: note = Severe acute respiratory syndrome coronavirus 2
MSFPQSAPHGV

SEQ ID NO: 22340 - protein, 16 aa, Severe acute respiratory syndrome-related coronavirus
  REGION 1..16: note = Table B: HLA-DRB1*14:02L HLA-DQA1*01-B1*05L
  source 1..16: note = Severe acute respiratory syndrome coronavirus 2
IQKEIDRLNEVAKNLN

SEQ ID NO: 22341 - protein, 12 aa, Severe acute respiratory syndrome-related coronavirus
  REGION 1..12: note = Table B: HLA-DRB1*14:02L HLA-DPA1*01:03-B1*104:01L
  source 1..12: note = Severe acute respiratory syndrome coronavirus 2
VRATATIPIQAS

SEQ ID NO: 22342 - protein, 13 aa, Severe acute respiratory syndrome-related coronavirus
  REGION 1..13: note = Table B: HLA-DRB1*14:02L HLA-DQA1*05:05-B1*03:19L HLA-DRB1*13:01L HLA-DQA1*05:05-B1*03:116L HLA-DPA1*01:03-B1*04:02L HLA-DRB1*14:54L HLA-DRB1*08:02L HLA-DRB1*08:03L
  source 1..13: note = Severe acute respiratory syndrome coronavirus 2
SKIITLKKRWQLA

SEQ ID NO: 22343 - protein, 16 aa, Severe acute respiratory syndrome-related coronavirus
  REGION 1..16: note = Table B: HLA-DRB1*14:02L
  source 1..16: note = Severe acute respiratory syndrome coronavirus 2
SSIVITSGDGTTSPIS

SEQ ID NO: 22344 - protein, 16 aa, Severe acute respiratory syndrome-related coronavirus
  REGION 1..16: note = Table B: HLA-DRB1*14:02L HLA-DRB1*15:03L
  source 1..16: note = Severe acute respiratory syndrome coronavirus 2
IVITSGDGTTSPISEH

SEQ ID NO: 22345 - protein, 11 aa, Severe acute respiratory syndrome-related coronavirus
  REGION 1..11: note = Table B: HLA-DRB1*14:02L
  source 1..11: note = Severe acute respiratory syndrome coronavirus 2
QLSTDTGVEHV

SEQ ID NO: 22346 - protein, 12 aa, Severe acute respiratory syndrome-related coronavirus
  REGION 1..12: note = Table B: HLA-DRB1*14:02L HLA-DQA1*05:05-B1*03:19L
  source 1..12: note = Severe acute respiratory syndrome coronavirus 2
FIYNKIVDEPEE

SEQ ID NO: 22347 - protein, 15 aa, Severe acute respiratory syndrome-related coronavirus
  REGION 1..15: note = Table B: HLA-DRB1*14:02L
  source 1..15: note = Severe acute respiratory syndrome coronavirus 2
YSRVKNLNSSRVPDL

SEQ ID NO: 22348 - protein, 15 aa, Severe acute respiratory syndrome-related coronavirus
  REGION 1..15: note = Table B: HLA-DRB1*14:02L
  source 1..15: note = Severe acute respiratory syndrome coronavirus 2
SRVKNLNSSRVPDLL

SEQ ID NO: 22349 - protein, 16 aa, Severe acute respiratory syndrome-related coronavirus
  REGION 1..16: note = Table B: HLA-DRB1*14:02L
  source 1..16: note = Severe acute respiratory syndrome coronavirus 2
LQFAYANRNRFLYIIK

SEQ ID NO: 22350 - protein, 15 aa, Severe acute respiratory syndrome-related coronavirus
  REGION 1..15: note = Table B: HLA-DRB1*14:02L
  source 1..15: note = Severe acute respiratory syndrome coronavirus 2
IASFRLFARTRSMWS

SEQ ID NO: 22351 - protein, 20 aa, Severe acute respiratory syndrome-related coronavirus
  REGION 1..20: note = Table B: HLA-DRB1*14:02L
  source 1..20: note = Severe acute respiratory syndrome coronavirus 2
VPLHGTILTRPLLESELVIG

SEQ ID NO: 22352 - protein, 17 aa, Severe acute respiratory syndrome-related coronavirus
  REGION 1..17: note = Table B: HLA-DRB1*14:02L
  source 1..17: note = Severe acute respiratory syndrome coronavirus 2
GAVILRGHLRIAGHHLG

SEQ ID NO: 22353 - protein, 13 aa, Severe acute respiratory syndrome-related coronavirus
  REGION 1..13: note = Table B: HLA-DRB1*14:02L
  source 1..13: note = Severe acute respiratory syndrome coronavirus 2
NYKLNTDHSSSSD

SEQ ID NO: 22354 - protein, 16 aa, Severe acute respiratory syndrome-related coronavirus
  REGION 1..16: note = Table B: HLA-DRB1*14:02L
  source 1..16: note = Severe acute respiratory syndrome coronavirus 2
EILLIIMRTFKVSIWN

SEQ ID NO: 22355 - protein, 15 aa, Severe acute respiratory syndrome-related coronavirus
  REGION 1..15: note = Table B: HLA-DRB1*14:02L
  source 1..15: note = Severe acute respiratory syndrome coronavirus 2
ELYHYQECVRGTTVL

SEQ ID NO: 22356 - protein, 13 aa, Severe acute respiratory syndrome-related coronavirus
  REGION 1..13: note = Table B: HLA-DRB1*14:02L HLA-DPA1*01:03-B1*04:02L HLA-DPA1*02:01-B1*13:01L HLA-DPA1*03:01-B1*105:01L HLA-DPA1*01:03-B1*02:01L HLA-DRB1*07:01L HLA-DQA1*01:03-B1*06:01L HLA-DRB1*08:02L
  source 1..13: note = Severe acute respiratory syndrome coronavirus 2
HVYQLRARSVSPK

SEQ ID NO: 22357 - protein, 16 aa, Severe acute respiratory syndrome-related coronavirus
  REGION 1..16: note = Table B: HLA-DRB1*14:02L HLA-DQA1*05:05-B1*03:116L HLA-DPA1*02:01-B1*13:01L
  source 1..16: note = Severe acute respiratory syndrome coronavirus 2
YFYYLGTGPEAGLPYG

SEQ ID NO: 22358 - protein, 16 aa, Severe acute respiratory syndrome-related coronavirus
  REGION 1..16: note = Table B: HLA-DRB1*14:02L
  source 1..16: note = Severe acute respiratory syndrome coronavirus 2
GGDAALALLLLDRLNQ

SEQ ID NO: 22359 - protein, 13 aa, Severe acute respiratory syndrome-related coronavirus
  REGION 1..13: note = Table B: HLA-DRB1*14:02L HLA-DPA1*02:01-B1*13:01L
  source 1..13: note = Severe acute respiratory syndrome coronavirus 2
FGDQELIRQGTDY

SEQ ID NO: 22360 - protein, 16 aa, Severe acute respiratory syndrome-related coronavirus
  REGION 1..16: note = Table B: HLA-DRB1*14:02L HLA-DRB3*01:01L HLA-DPA1*01:03-B1*104:01L HLA-DRB1*07:01L
  source 1..16: note = Severe acute respiratory syndrome coronavirus 2
SKQLQQSMSSADSTQA

SEQ ID NO: 22361 - protein, 13 aa, Severe acute respiratory syndrome-related coronavirus
  REGION 1..13: note = Table B: HLA-DQA1*01:01-B1*05:01L
  source 1..13: note = Severe acute respiratory syndrome coronavirus 2
ELNGGAYTRYVDN

SEQ ID NO: 22362 - protein, 16 aa, Severe acute respiratory syndrome-related coronavirus
  REGION 1..16: note = Table B: HLA-DQA1*01:01-B1*05:01L HLA-DQA1*05:05-B1*03:19L HLA-DPA1*03:01-B1*105:01L HLA-DQA1*05:05-B1*03:01L
  source 1..16: note = Severe acute respiratory syndrome coronavirus 2
EDEEEGDCEEEEFEPS

SEQ ID NO: 22363 - protein, 14 aa, Severe acute respiratory syndrome-related coronavirus
  REGION 1..14: note = Table B: HLA-DQA1*01:01-B1*05:01L HLA-DRB1*08:01L HLA-DRB1*13:01L
  source 1..14: note = Severe acute respiratory syndrome coronavirus 2
EEEEFEPSTQYEYG

SEQ ID NO: 22364 - protein, 15 aa, Severe acute respiratory syndrome-related coronavirus
  REGION 1..15: note = Table B: HLA-DQA1*01:01-B1*05:01L HLA-DRB1*15:03L
  source 1..15: note = Severe acute respiratory syndrome coronavirus 2
NQTTTIQTIVEVQPQ

SEQ ID NO: 22365 - protein, 11 aa, Severe acute respiratory syndrome-related coronavirus
  REGION 1..11: note = Table B: HLA-DQA1*01:01-B1*05:01L
  source 1..11: note = Severe acute respiratory syndrome coronavirus 2
VAGALNKATNN

SEQ ID NO: 22366 - protein, 15 aa, Severe acute respiratory syndrome-related coronavirus
  REGION 1..15: note = Table B: HLA-DQA1*01:01-B1*05:01L HLA-DPA1*01:03-B1*104:01L HLA-DRB1*08:03L
  source 1..15: note = Severe acute respiratory syndrome coronavirus 2
IQLLKSAYENFNQHE

SEQ ID NO: 22367 - protein, 15 aa, Severe acute respiratory syndrome-related coronavirus
  REGION 1..15: note = Table B: HLA-DQA1*01:01-B1*05:01L
  source 1..15: note = Severe acute respiratory syndrome coronavirus 2
TNVYLAVFDKNLYDK

SEQ ID NO: 22368 - protein, 13 aa, Severe acute respiratory syndrome-related coronavirus
  REGION 1..13: note = Table B: HLA-DQA1*01:01-B1*05:01L HLA-DPA1*01:02-B1*04:01L
  source 1..13: note = Severe acute respiratory syndrome coronavirus 2
FLEMKSEKQVEQK

SEQ ID NO: 22369 - protein, 11 aa, Severe acute respiratory syndrome-related coronavirus
  REGION 1..11: note = Table B: HLA-DQA1*01:01-B1*05:01L
  source 1..11: note = Severe acute respiratory syndrome coronavirus 2
EEVTTTLEETK

SEQ ID NO: 22370 - protein, 11 aa, Severe acute respiratory syndrome-related coronavirus
  REGION 1..11: note = Table B: HLA-DQA1*01:01-B1*05:01L
  source 1..11: note = Severe acute respiratory syndrome coronavirus 2
DNINLHTQVVD

SEQ ID NO: 22371 - protein, 12 aa, Severe acute respiratory syndrome-related coronavirus
  REGION 1..12: note = Table B: HLA-DQA1*01:01-B1*05:01L
  source 1..12: note = Severe acute respiratory syndrome coronavirus 2
TFYVLPNDDTLR

SEQ ID NO: 22372 - protein, 14 aa, Severe acute respiratory syndrome-related coronavirus
  REGION 1..14: note = Table B: HLA-DQA1*01:01-B1*05:01L HLA-DRB1*08:03L
  source 1..14: note = Severe acute respiratory syndrome coronavirus 2
IELKFNPPALQDAY

SEQ ID NO: 22373 - protein, 14 aa, Severe acute respiratory syndrome-related coronavirus
  REGION 1..14: note = Table B: HLA-DQA1*01:01-B1*05:01L HLA-DRB4*02:01NL HLA-DRB1*13:01L HLA-DPA1*01:03-B1*02:01L
  source 1..14: note = Severe acute respiratory syndrome coronavirus 2
SPFVMMSAPPAQYE

SEQ ID NO: 22374 - protein, 14 aa, Severe acute respiratory syndrome-related coronavirus
  REGION 1..14: note = Table B: HLA-DQA1*01:01-B1*05:01L
  source 1..14: note = Severe acute respiratory syndrome coronavirus 2
GDVVAIDYKHYTPS

SEQ ID NO: 22375 - protein, 13 aa, Severe acute respiratory syndrome-related coronavirus
  REGION 1..13: note = Table B: HLA-DQA1*01:01-B1*05:01L HLA-DRB1*04:10L HLA-DPA1*02:01-B1*13:01L HLA-DQA1*05:05-B1*03:01L
  source 1..13: note = Severe acute respiratory syndrome coronavirus 2
VNNATNKATYKPN

SEQ ID NO: 22376 - protein, 13 aa, Severe acute respiratory syndrome-related coronavirus
  REGION 1..13: note = Table B: HLA-DQA1*01:01-B1*05:01L HLA-DRB4*01:01L HLA-DPA1*01:03-B1*104:01L HLA-DRB1*08:02L
  source 1..13: note = Severe acute respiratory syndrome coronavirus 2
NSFDVLKSEDAQG

SEQ ID NO: 22377 - protein, 14 aa, Severe acute respiratory syndrome-related coronavirus
  REGION 1..14: note = Table B: HLA-DQA1*01:01-B1*05:01L HLA-DRB1*08:01L
  source 1..14: note = Severe acute respiratory syndrome coronavirus 2
ATHGLAAVNSVPWD

SEQ ID NO: 22378 - protein, 13 aa, Severe acute respiratory syndrome-related coronavirus
  REGION 1..13: note = Table B: HLA-DQA1*01:01-B1*05:01L HLA-DPA1*01:03-B1*02:01L HLA-DRB1*08:02L
  source 1..13: note = Severe acute respiratory syndrome coronavirus 2
LNKVVSTTTNIVT

SEQ ID NO: 22379 - protein, 14 aa, Severe acute respiratory syndrome-related coronavirus
  REGION 1..14: note = Table B: HLA-DQA1*01:01-B1*05:01L
  source 1..14: note = Severe acute respiratory syndrome coronavirus 2
YREGYLNSTNVTIA

SEQ ID NO: 22380 - protein, 15 aa, Severe acute respiratory syndrome-related coronavirus
  REGION 1..15: note = Table B: HLA-DQA1*01:01-B1*05:01L HLA-DRB1*08:01L HLA-DPA1*02:01-B1*13:01L
  source 1..15: note = Severe acute respiratory syndrome coronavirus 2
LSGLDSLDTYPSLET

SEQ ID NO: 22381 - protein, 14 aa, Severe acute respiratory syndrome-related coronavirus
  REGION 1..14: note = Table B: HLA-DQA1*01:01-B1*05:01L
  source 1..14: note = Severe acute respiratory syndrome coronavirus 2
RPINPTDQSSYIVD

SEQ ID NO: 22382 - protein, 13 aa, Severe acute respiratory syndrome-related coronavirus
  REGION 1..13: note = Table B: HLA-DQA1*01:01-B1*05:01L HLA-DRB1*04:08L
  source 1..13: note = Severe acute respiratory syndrome coronavirus 2
ESSAKSASVYYSQ

SEQ ID NO: 22383 - protein, 12 aa, Severe acute respiratory syndrome-related coronavirus
  REGION 1..12: note = Table B: HLA-DQA1*01:01-B1*05:01L
  source 1..12: note = Severe acute respiratory syndrome coronavirus 2
QGFVDSDVETKD

SEQ ID NO: 22384 - protein, 14 aa, Severe acute respiratory syndrome-related coronavirus
  REGION 1..14: note = Table B: HLA-DQA1*01:01-B1*05:01L
  source 1..14: note = Severe acute respiratory syndrome coronavirus 2
TTRQVVNVVTTKIA

SEQ ID NO: 22385 - protein, 16 aa, Severe acute respiratory syndrome-related coronavirus
  REGION 1..16: note = Table B: HLA-DQA1*01:01-B1*05:01L HLA-DRB4*01:01L HLA-DQA1*05:05-B1*03:116L HLA-DRB1*09:01L HLA-DRB1*12:02L HLA-DRB1*15:01L
  source 1..16: note = Severe acute respiratory syndrome coronavirus 2
SGRWVLNNDYYRSLPG

SEQ ID NO: 22386 - protein, 12 aa, Severe acute respiratory syndrome-related coronavirus
  REGION 1..12: note = Table B: HLA-DQA1*01:01-B1*05:01L
  source 1..12: note = Severe acute respiratory syndrome coronavirus 2
SGAMDTTSYREA

SEQ ID NO: 22387 - protein, 12 aa, Severe acute respiratory syndrome-related coronavirus
  REGION 1..12: note = Table B: HLA-DQA1*01:01-B1*05:01L HLA-DPA1*02:01-B1*13:01L
  source 1..12: note = Severe acute respiratory syndrome coronavirus 2
GAMDTTSYREAA

SEQ ID NO: 22388 - protein, 14 aa, Severe acute respiratory syndrome-related coronavirus
  REGION 1..14: note = Table B: HLA-DQA1*01:01-B1*05:01L
  source 1..14: note = Severe acute respiratory syndrome coronavirus 2
NGRTILGSALLEDE

SEQ ID NO: 22389 - protein, 11 aa, Severe acute respiratory syndrome-related coronavirus
  REGION 1..11: note = Table B: HLA-DQA1*01:01-B1*05:01L HLA-DPA1*01:03-B1*04:02L HLA-DRB1*12:02L HLA-DPA1*01:02-B1*04:01L
  source 1..11: note = Severe acute respiratory syndrome coronavirus 2
DMVDTSLSGFK

SEQ ID NO: 22390 - protein, 11 aa, Severe acute respiratory syndrome-related coronavirus
  REGION 1..11: note = Table B: HLA-DQA1*01:01-B1*05:01L
  source 1..11: note = Severe acute respiratory syndrome coronavirus 2
SMQGAVDINKL

SEQ ID NO: 22391 - protein, 15 aa, Severe acute respiratory syndrome-related coronavirus
  REGION 1..15: note = Table B: HLA-DQA1*01:01-B1*05:01L HLA-DRB4*01:01L HLA-DPA1*01:02-B1*04:01L HLA-DRB1*15:01L
  source 1..15: note = Severe acute respiratory syndrome coronavirus 2
IASEFSSLPSYAAFA

SEQ ID NO: 22392 - protein, 14 aa, Severe acute respiratory syndrome-related coronavirus
  REGION 1..14: note = Table B: HLA-DQA1*01:01-B1*05:01L HLA-DRB3*01:01L HLA-DRB1*07:01L HLA-DRB1*15:03L
  source 1..14: note = Severe acute respiratory syndrome coronavirus 2
LKKSLNVAKSEFDR

SEQ ID NO: 22393 - protein, 14 aa, Severe acute respiratory syndrome-related coronavirus
  REGION 1..14: note = Table B: HLA-DQA1*01:01-B1*05:01L
  source 1..14: note = Severe acute respiratory syndrome coronavirus 2
VDADSKIVQLSEIS

SEQ ID NO: 22394 - protein, 12 aa, Severe acute respiratory syndrome-related coronavirus
  REGION 1..12: note = Table B: HLA-DQA1*01:01-B1*05:01L HLA-DRB1*09:01L HLA-DPA1*01:03-B1*02:01L HLA-DRB1*07:01L
  source 1..12: note = Severe acute respiratory syndrome coronavirus 2
FAVDAAKAYKDY

SEQ ID NO: 22395 - protein, 15 aa, Severe acute respiratory syndrome-related coronavirus
  REGION 1..15: note = Table B: HLA-DQA1*01:01-B1*05:01L HLA-DQA1*05:05-B1*03:19L HLA-DPA1*01:03-B1*04:01L HLA-DRB1*10:01L
  source 1..15: note = Severe acute respiratory syndrome coronavirus 2
AAKAYKDYLASGGQP

SEQ ID NO: 22396 - protein, 14 aa, Severe acute respiratory syndrome-related coronavirus
  REGION 1..14: note = Table B: HLA-DQA1*01:01-B1*05:01L
  source 1..14: note = Severe acute respiratory syndrome coronavirus 2
DEDDNLIDSYFVVK

SEQ ID NO: 22397 - protein, 13 aa, Severe acute respiratory syndrome-related coronavirus
  REGION 1..13: note = Table B: HLA-DQA1*01:01-B1*05:01L HLA-DRB1*08:01L HLA-DQA1*05:01-B1*02:01L HLA-DRB1*12:01L HLA-DPA1*02:01-B1*13:01L
  source 1..13: note = Severe acute respiratory syndrome coronavirus 2
LTRALTAESHVDT

SEQ ID NO: 22398 - protein, 13 aa, Severe acute respiratory syndrome-related coronavirus
  REGION 1..13: note = Table B: HLA-DQA1*01:01-B1*05:01L
  source 1..13: note = Severe acute respiratory syndrome coronavirus 2
ALTAESHVDTDLT

SEQ ID NO: 22399 - protein, 15 aa, Severe acute respiratory syndrome-related coronavirus
  REGION 1..15: note = Table B: HLA-DQA1*01:01-B1*05:01L
  source 1..15: note = Severe acute respiratory syndrome coronavirus 2
ELLVYAADPAMHAAS

SEQ ID NO: 22400 - protein, 14 aa, Severe acute respiratory syndrome-related coronavirus
  REGION 1..14: note = Table B: HLA-DQA1*01:01-B1*05:01L HLA-DPA1*01:03-B1*04:01L HLA-DPA1*01:03-B1*02:01L
  source 1..14: note = Severe acute respiratory syndrome coronavirus 2
VYAADPAMHAASGN

SEQ ID NO: 22401 - protein, 13 aa, Severe acute respiratory syndrome-related coronavirus
  REGION 1..13: note = Table B: HLA-DQA1*01:01-B1*05:01L
  source 1..13: note = Severe acute respiratory syndrome coronavirus 2
AADPAMHAASGNL

SEQ ID NO: 22402 - protein, 15 aa, Severe acute respiratory syndrome-related coronavirus
  REGION 1..15: note = Table B: HLA-DQA1*01:01-B1*05:01L HLA-DRB4*01:01L
  source 1..15: note = Severe acute respiratory syndrome coronavirus 2
DYYRYNLPTMCDIRQ

SEQ ID NO: 22403 - protein, 12 aa, Severe acute respiratory syndrome-related coronavirus
  REGION 1..12: note = Table B: HLA-DQA1*01:01-B1*05:01L HLA-DQA1*01-B1*05L HLA-DQA1*05:05-B1*03:01L HLA-DRB1*16:01L
  source 1..12: note = Severe acute respiratory syndrome coronavirus 2
NANQVIVNNLDK

SEQ ID NO: 22404 - protein, 14 aa, Severe acute respiratory syndrome-related coronavirus
  REGION 1..14: note = Table B: HLA-DQA1*01:01-B1*05:01L HLA-DRB5*01:01L HLA-DRB4*02:01NL HLA-DRB4*01:01L HLA-DRB1*09:01L HLA-DRB1*15:01L
  source 1..14: note = Severe acute respiratory syndrome coronavirus 2
DALFAYTKRNVIPT

SEQ ID NO: 22405 - protein, 13 aa, Severe acute respiratory syndrome-related coronavirus
  REGION 1..13: note = Table B: HLA-DQA1*01:01-B1*05:01L HLA-DQA1*05:05-B1*03:19L HLA-DQA1*05:05-B1*03:01L HLA-DRB1*04:08L
  source 1..13: note = Severe acute respiratory syndrome coronavirus 2
LPYPDPSRILGAG

SEQ ID NO: 22406 - protein, 16 aa, Severe acute respiratory syndrome-related coronavirus
  REGION 1..16: note = Table B: HLA-DQA1*01:01-B1*05:01L HLA-DRB4*02:01NL HLA-DRB1*15:01L
  source 1..16: note = Severe acute respiratory syndrome coronavirus 2
SVMLTNDNTSRYWEPE

SEQ ID NO: 22407 - protein, 15 aa, Severe acute respiratory syndrome-related coronavirus
  REGION 1..15: note = Table B: HLA-DQA1*01:01-B1*05:01L
  source 1..15: note = Severe acute respiratory syndrome coronavirus 2
AVVYRGTTTYKLNVG

SEQ ID NO: 22408 - protein, 11 aa, Severe acute respiratory syndrome-related coronavirus
  REGION 1..11: note = Table B: HLA-DQA1*01:01-B1*05:01L HLA-DQA1*05:05-B1*03:19L
  source 1..11: note = Severe acute respiratory syndrome coronavirus 2
GDPAQLPAPRT

SEQ ID NO: 22409 - protein, 12 aa, Severe acute respiratory syndrome-related coronavirus
  REGION 1..12: note = Table B: HLA-DQA1*01:01-B1*05:01L
  source 1..12: note = Severe acute respiratory syndrome coronavirus 2
LTKGTLEPEYFN

SEQ ID NO: 22410 - protein, 16 aa, Severe acute respiratory syndrome-related coronavirus
  REGION 1..16: note = Table B: HLA-DQA1*01:01-B1*05:01L HLA-DPA1*01:03-B1*04:01L
  source 1..16: note = Severe acute respiratory syndrome coronavirus 2
VSALVYDNKLKAHKDK

SEQ ID NO: 22411 - protein, 14 aa, Severe acute respiratory syndrome-related coronavirus
  REGION 1..14: note = Table B: HLA-DQA1*01:01-B1*05:01L
  source 1..14: note = Severe acute respiratory syndrome coronavirus 2
YKGVITHDVSSAIN

SEQ ID NO: 22412 - protein, 15 aa, Severe acute respiratory syndrome-related coronavirus
  REGION 1..15: note = Table B: HLA-DQA1*01:01-B1*05:01L
  source 1..15: note = Severe acute respiratory syndrome coronavirus 2
KGVITHDVSSAINRP

SEQ ID NO: 22413 - protein, 14 aa, Severe acute respiratory syndrome-related coronavirus
  REGION 1..14: note = Table B: HLA-DQA1*01:01-B1*05:01L HLA-DRB1*11:01L HLA-DRB4*01:01L HLA-DPA1*01:03-B1*04:01L HLA-DPA1*01:03-B1*04:02L HLA-DRB3*01:01L
  source 1..14: note = Severe acute respiratory syndrome coronavirus 2
VASKILGLPTQTVD

SEQ ID NO: 22414 - protein, 13 aa, Severe acute respiratory syndrome-related coronavirus
  REGION 1..13: note = Table B: HLA-DQA1*01:01-B1*05:01L HLA-DRB1*08:02L
  source 1..13: note = Severe acute respiratory syndrome coronavirus 2
GFKMNYQVNGYPN

SEQ ID NO: 22415 - protein, 16 aa, Severe acute respiratory syndrome-related coronavirus
  REGION 1..16: note = Table B: HLA-DQA1*01:01-B1*05:01L HLA-DPA1*02:01-B1*13:01L HLA-DQA1*05:05-B1*03:01L
  source 1..16: note = Severe acute respiratory syndrome coronavirus 2
TPNNTDFSRVSAKPPP

SEQ ID NO: 22416 - protein, 13 aa, Severe acute respiratory syndrome-related coronavirus
  REGION 1..13: note = Table B: HLA-DQA1*01:01-B1*05:01L HLA-DQA1*05:05-B1*03:01L
  source 1..13: note = Severe acute respiratory syndrome coronavirus 2
FHTPAFDKSAFVN

SEQ ID NO: 22417 - protein, 12 aa, Severe acute respiratory syndrome-related coronavirus
  REGION 1..12: note = Table B: HLA-DQA1*01:01-B1*05:01L HLA-DQA1*05:01-B1*02:01L HLA-DQA1*05:05-B1*03:01L
  source 1..12: note = Severe acute respiratory syndrome coronavirus 2
GQQGEVPVSIIN

SEQ ID NO: 22418 - protein, 16 aa, Severe acute respiratory syndrome-related coronavirus
  REGION 1..16: note = Table B: HLA-DQA1*01:01-B1*05:01L HLA-DRB4*02:01NL HLA-DRB1*13:01L HLA-DRB1*15:01L
  source 1..16: note = Severe acute respiratory syndrome coronavirus 2
VPVSIINNTVYTKVDG

SEQ ID NO: 22419 - protein, 14 aa, Severe acute respiratory syndrome-related coronavirus
  REGION 1..14: note = Table B: HLA-DQA1*01:01-B1*05:01L HLA-DRB1*04:08L
  source 1..14: note = Severe acute respiratory syndrome coronavirus 2
DADSTLIGDCATVH

SEQ ID NO: 22420 - protein, 15 aa, Severe acute respiratory syndrome-related coronavirus
  REGION 1..15: note = Table B: HLA-DQA1*01:01-B1*05:01L
  source 1..15: note = Severe acute respiratory syndrome coronavirus 2
IFWRNTNPIQLSSYS

SEQ ID NO: 22421 - protein, 13 aa, Severe acute respiratory syndrome-related coronavirus
  REGION 1..13: note = Table B: HLA-DQA1*01:01-B1*05:01L HLA-DRB1*14:54L HLA-DRB1*04:08L
  source 1..13: note = Severe acute respiratory syndrome coronavirus 2
LTTRTQLPPAYTN

SEQ ID NO: 22422 - protein, 16 aa, Severe acute respiratory syndrome-related coronavirus
  REGION 1..16: note = Table B: HLA-DQA1*01:01-B1*05:01L HLA-DRB1*09:01L
  source 1..16: note = Severe acute respiratory syndrome coronavirus 2
TRGVYYPDKVFRSSVL

SEQ ID NO: 22423 - protein, 11 aa, Severe acute respiratory syndrome-related coronavirus
  REGION 1..11: note = Table B: HLA-DQA1*01:01-B1*05:01L
  source 1..11: note = Severe acute respiratory syndrome coronavirus 2
GVYFASTEKSN

SEQ ID NO: 22424 - protein, 14 aa, Severe acute respiratory syndrome-related coronavirus
  REGION 1..14: note = Table B: HLA-DQA1*01:01-B1*05:01L HLA-DPA1*02:01-B1*13:01L HLA-DPA1*01:03-B1*104:01L
  source 1..14: note = Severe acute respiratory syndrome coronavirus 2
SKTQSLLIVNNATN

SEQ ID NO: 22425 - protein, 13 aa, Severe acute respiratory syndrome-related coronavirus
  REGION 1..13: note = Table B: HLA-DQA1*01:01-B1*05:01L
  source 1..13: note = Severe acute respiratory syndrome coronavirus 2
IYQTSNFRVQPTE

SEQ ID NO: 22426 - protein, 12 aa, Severe acute respiratory syndrome-related coronavirus
  REGION 1..12: note = Table B: HLA-DQA1*01:01-B1*05:01L HLA-DRB1*16:01L HLA-DRB1*04:08L
  source 1..12: note = Severe acute respiratory syndrome coronavirus 2
DYNYKLPDDFTG

SEQ ID NO: 22427 - protein, 12 aa, Severe acute respiratory syndrome-related coronavirus
  REGION 1..12: note = Table B: HLA-DQA1*01:01-B1*05:01L HLA-DQA1*05:05-B1*03:01L
  source 1..12: note = Severe acute respiratory syndrome coronavirus 2
TTDAVRDPQTLE

SEQ ID NO: 22428 - protein, 14 aa, Severe acute respiratory syndrome-related coronavirus
  REGION 1..14: note = Table B: HLA-DQA1*01:01-B1*05:01L
  source 1..14: note = Severe acute respiratory syndrome coronavirus 2
GAENSVAYSNNSIA

SEQ ID NO: 22429 - protein, 12 aa, Severe acute respiratory syndrome-related coronavirus
  REGION 1..12: note = Table B: HLA-DQA1*01:01-B1*05:01L HLA-DPA1*03:01-B1*105:01L HLA-DQA1*05:05-B1*03:01L
  source 1..12: note = Severe acute respiratory syndrome coronavirus 2
GVTQNVLYENQK

SEQ ID NO: 22430 - protein, 14 aa, Severe acute respiratory syndrome-related coronavirus
  REGION 1..14: note = Table B: HLA-DQA1*01:01-B1*05:01L HLA-DPA1*02:01-B1*13:01L
  source 1..14: note = Severe acute respiratory syndrome coronavirus 2
YEPQIITTDNTFVS

SEQ ID NO: 22431 - protein, 11 aa, Severe acute respiratory syndrome-related coronavirus
  REGION 1..11: note = Table B: HLA-DQA1*01:01-B1*05:01L
  source 1..11: note = Severe acute respiratory syndrome coronavirus 2
TTSPISEHDYQ

SEQ ID NO: 22432 - protein, 13 aa, Severe acute respiratory syndrome-related coronavirus
  REGION 1..13: note = Table B: HLA-DQA1*01:01-B1*05:01L
  source 1..13: note = Severe acute respiratory syndrome coronavirus 2
DGSSGVVNPVMEP

SEQ ID NO: 22433 - protein, 14 aa, Severe acute respiratory syndrome-related coronavirus
  REGION 1..14: note = Table B: HLA-DQA1*01:01-B1*05:01L
  source 1..14: note = Severe acute respiratory syndrome coronavirus 2
GSKSPIQYIDIGNY

SEQ ID NO: 22434 - protein, 13 aa, Severe acute respiratory syndrome-related coronavirus
  REGION 1..13: note = Table B: HLA-DQA1*01:01-B1*05:01L HLA-DRB1*08:01L
  source 1..13: note = Severe acute respiratory syndrome coronavirus 2
GTGPEAGLPYGAN

SEQ ID NO: 22435 - protein, 14 aa, Severe acute respiratory syndrome-related coronavirus
  REGION 1..14: note = Table B: HLA-DQA1*01:01-B1*05:01L HLA-DPA1*01:03-B1*04:02L HLA-DPA1*03:01-B1*105:01L
  source 1..14: note = Severe acute respiratory syndrome coronavirus 2
EGSRGGSQASSRSS

SEQ ID NO: 22436 - protein, 14 aa, Severe acute respiratory syndrome-related coronavirus
  REGION 1..14: note = Table B: HLA-DQA1*01:01-B1*05:01L HLA-DRB1*04:10L HLA-DRB1*04:08L
  source 1..14: note = Severe acute respiratory syndrome coronavirus 2
TSPARMAGNGGDAA

SEQ ID NO: 22437 - protein, 11 aa, Severe acute respiratory syndrome-related coronavirus
  REGION 1..11: note = Table B: HLA-DQA1*01:01-B1*05:01L HLA-DQA1*05:05-B1*03:19L
  source 1..11: note = Severe acute respiratory syndrome coronavirus 2
ADETQALPQRQ

SEQ ID NO: 22438 - protein, 13 aa, Severe acute respiratory syndrome-related coronavirus
  REGION 1..13: note = Table B: HLA-DRB1*08:01L HLA-DQA1*01-B1*05L HLA-DPA1*01:02-B1*04:01L
  source 1..13: note = Severe acute respiratory syndrome coronavirus 2
ELEGIQYGRSGET

SEQ ID NO: 22439 - protein, 12 aa, Severe acute respiratory syndrome-related coronavirus
  REGION 1..12: note = Table B: HLA-DRB1*08:01L
  source 1..12: note = Severe acute respiratory syndrome coronavirus 2
RKVLLRKNGNKG

SEQ ID NO: 22440 - protein, 14 aa, Severe acute respiratory syndrome-related coronavirus
  REGION 1..14: note = Table B: HLA-DRB1*08:01L HLA-DRB1*12:01L HLA-DRB1*16:01L
  source 1..14: note = Severe acute respiratory syndrome coronavirus 2
KVLLRKNGNKGAGG

SEQ ID NO: 22441 - protein, 13 aa, Severe acute respiratory syndrome-related coronavirus
  REGION 1..13: note = Table B: HLA-DRB1*08:01L
  source 1..13: note = Severe acute respiratory syndrome coronavirus 2
TKRGVYCCREHEH

SEQ ID NO: 22442 - protein, 12 aa, Severe acute respiratory syndrome-related coronavirus
  REGION 1..12: note = Table B: HLA-DRB1*08:01L
  source 1..12: note = Severe acute respiratory syndrome coronavirus 2
PFEIKLAKKFDT

SEQ ID NO: 22443 - protein, 11 aa, Severe acute respiratory syndrome-related coronavirus
  REGION 1..11: note = Table B: HLA-DRB1*08:01L
  source 1..11: note = Severe acute respiratory syndrome coronavirus 2
IIKTIQPRVEK

SEQ ID NO: 22444 - protein, 12 aa, Severe acute respiratory syndrome-related coronavirus
  REGION 1..12: note = Table B: HLA-DRB1*08:01L HLA-DQA1*03:01-B1*03:02L
  source 1..12: note = Severe acute respiratory syndrome coronavirus 2
IQPRVEKKKLDG

SEQ ID NO: 22445 - protein, 14 aa, Severe acute respiratory syndrome-related coronavirus
  REGION 1..14: note = Table B: HLA-DRB1*08:01L
  source 1..14: note = Severe acute respiratory syndrome coronavirus 2
LDGFMGRIRSVYPV

SEQ ID NO: 22446 - protein, 12 aa, Severe acute respiratory syndrome-related coronavirus
  REGION 1..12: note = Table B: HLA-DRB1*08:01L
  source 1..12: note = Severe acute respiratory syndrome coronavirus 2
TSWQTGDFVKAT

SEQ ID NO: 22447 - protein, 15 aa, Severe acute respiratory syndrome-related coronavirus
  REGION 1..15: note = Table B: HLA-DRB1*08:01L
  source 1..15: note = Severe acute respiratory syndrome coronavirus 2
VVKIYCPACHNSEVG

SEQ ID NO: 22448 - protein, 14 aa, Severe acute respiratory syndrome-related coronavirus
  REGION 1..14: note = Table B: HLA-DRB1*08:01L HLA-DRB1*16:01L HLA-DRB1*04:08L
  source 1..14: note = Severe acute respiratory syndrome coronavirus 2
VGPEHSLAEYHNES

SEQ ID NO: 22449 - protein, 15 aa, Severe acute respiratory syndrome-related coronavirus
  REGION 1..15: note = Table B: HLA-DRB1*08:01L
  source 1..15: note = Severe acute respiratory syndrome coronavirus 2
EGLNDNLLEILQKEK

SEQ ID NO: 22450 - protein, 11 aa, Severe acute respiratory syndrome-related coronavirus
  REGION 1..11: note = Table B: HLA-DRB1*08:01L HLA-DQA1*03:01-B1*03:02L HLA-DQA1*05:05-B1*03:01L HLA-DRB1*08:03L
  source 1..11: note = Severe acute respiratory syndrome coronavirus 2
AFVETVKGLDY

SEQ ID NO: 22451 - protein, 13 aa, Severe acute respiratory syndrome-related coronavirus
  REGION 1..13: note = Table B: HLA-DRB1*08:01L
  source 1..13: note = Severe acute respiratory syndrome coronavirus 2
VETVKGLDYKAFK

SEQ ID NO: 22452 - protein, 14 aa, Severe acute respiratory syndrome-related coronavirus
  REGION 1..14: note = Table B: HLA-DRB1*08:01L HLA-DRB1*07:01L HLA-DRB1*15:01L
  source 1..14: note = Severe acute respiratory syndrome coronavirus 2
KAAITILDGISQYS

SEQ ID NO: 22453 - protein, 14 aa, Severe acute respiratory syndrome-related coronavirus
  REGION 1..14: note = Table B: HLA-DRB1*08:01L
  source 1..14: note = Severe acute respiratory syndrome coronavirus 2
KLKPVLDWLEEKFK

SEQ ID NO: 22454 - protein, 13 aa, Severe acute respiratory syndrome-related coronavirus
  REGION 1..13: note = Table B: HLA-DRB1*08:01L
  source 1..13: note = Severe acute respiratory syndrome coronavirus 2
IIGGAKLKALNLG

SEQ ID NO: 22455 - protein, 11 aa, Severe acute respiratory syndrome-related coronavirus
  REGION 1..11: note = Table B: HLA-DRB1*08:01L
  source 1..11: note = Severe acute respiratory syndrome coronavirus 2
GLYRKCVKSRE

SEQ ID NO: 22456 - protein, 10 aa, Severe acute respiratory syndrome-related coronavirus
  REGION 1..10: note = Table B: HLA-DRB1*08:01L
  source 1..10: note = Severe acute respiratory syndrome coronavirus 2
YRKCVKSREE

SEQ ID NO: 22457 - protein, 13 aa, Severe acute respiratory syndrome-related coronavirus
  REGION 1..13: note = Table B: HLA-DRB1*08:01L
  source 1..13: note = Severe acute respiratory syndrome coronavirus 2
EVVLKTGDLQPLE

SEQ ID NO: 22458 - protein, 13 aa, Severe acute respiratory syndrome-related coronavirus
  REGION 1..13: note = Table B: HLA-DRB1*08:01L HLA-DRB1*04:08L
  source 1..13: note = Severe acute respiratory syndrome coronavirus 2
NGLMLLEIKDTEK

SEQ ID NO: 22459 - protein, 12 aa, Severe acute respiratory syndrome-related coronavirus
  REGION 1..12: note = Table B: HLA-DRB1*08:01L
  source 1..12: note = Severe acute respiratory syndrome coronavirus 2
NITFELDERIDK

SEQ ID NO: 22460 - protein, 14 aa, Severe acute respiratory syndrome-related coronavirus
  REGION 1..14: note = Table B: HLA-DRB1*08:01L
  source 1..14: note = Severe acute respiratory syndrome coronavirus 2
QYEYGTEDDYQGKP

SEQ ID NO: 22461 - protein, 14 aa, Severe acute respiratory syndrome-related coronavirus
  REGION 1..14: note = Table B: HLA-DRB1*08:01L HLA-DPA1*02:01-B1*13:01L
  source 1..14: note = Severe acute respiratory syndrome coronavirus 2
ATSAALQPEEEQEE

SEQ ID NO: 22462 - protein, 13 aa, Severe acute respiratory syndrome-related coronavirus
  REGION 1..13: note = Table B: HLA-DRB1*08:01L
  source 1..13: note = Severe acute respiratory syndrome coronavirus 2
SKPSVEQRKQDDK

SEQ ID NO: 22463 - protein, 13 aa, Severe acute respiratory syndrome-related coronavirus
  REGION 1..13: note = Table B: HLA-DRB1*08:01L
  source 1..13: note = Severe acute respiratory syndrome coronavirus 2
MLAKALRKVPTDN

SEQ ID NO: 22464 - protein, 15 aa, Severe acute respiratory syndrome-related coronavirus
  REGION 1..15: note = Table B: HLA-DRB1*08:01L HLA-DPA1*01:02-B1*04:01L HLA-DRB1*04:08L
  source 1..15: note = Severe acute respiratory syndrome coronavirus 2
VVDYGARFYFYTSKT

SEQ ID NO: 22465 - protein, 12 aa, Severe acute respiratory syndrome-related coronavirus
  REGION 1..12: note = Table B: HLA-DRB1*08:01L
  source 1..12: note = Severe acute respiratory syndrome coronavirus 2
RFYFYTSKTTVA

SEQ ID NO: 22466 - protein, 14 aa, Severe acute respiratory syndrome-related coronavirus
  REGION 1..14: note = Table B: HLA-DRB1*08:01L HLA-DRB3*01:01L HLA-DRB1*04:08L
  source 1..14: note = Severe acute respiratory syndrome coronavirus 2
THGLNLEEAARYMR

SEQ ID NO: 22467 - protein, 11 aa, Severe acute respiratory syndrome-related coronavirus
  REGION 1..11: note = Table B: HLA-DRB1*08:01L
  source 1..11: note = Severe acute respiratory syndrome coronavirus 2
GYLTSSSKTPE

SEQ ID NO: 22468 - protein, 11 aa, Severe acute respiratory syndrome-related coronavirus
  REGION 1..11: note = Table B: HLA-DRB1*08:01L
  source 1..11: note = Severe acute respiratory syndrome coronavirus 2
GIEFLKRGDKS

SEQ ID NO: 22469 - protein, 12 aa, Severe acute respiratory syndrome-related coronavirus
  REGION 1..12: note = Table B: HLA-DRB1*08:01L HLA-DRB4*01:01L HLA-DRB1*09:01L HLA-DRB1*12:02L HLA-DRB3*01:01L HLA-DRB1*07:01L HLA-DRB1*08:03L
  source 1..12: note = Severe acute respiratory syndrome coronavirus 2
NLHTQVVDMSMT

SEQ ID NO: 22470 - protein, 13 aa, Severe acute respiratory syndrome-related coronavirus
  REGION 1..13: note = Table B: HLA-DRB1*08:01L HLA-DRB1*15:03L
  source 1..13: note = Severe acute respiratory syndrome coronavirus 2
LNHTKKWKYPQVN

SEQ ID NO: 22471 - protein, 13 aa, Severe acute respiratory syndrome-related coronavirus
  REGION 1..13: note = Table B: HLA-DRB1*08:01L
  source 1..13: note = Severe acute respiratory syndrome coronavirus 2
LQDAYYRARAGEA

SEQ ID NO: 22472 - protein, 12 aa, Severe acute respiratory syndrome-related coronavirus
  REGION 1..12: note = Table B: HLA-DRB1*08:01L HLA-DPA1*01:03-B1*04:02L HLA-DRB1*12:01L HLA-DRB1*15:03L
  source 1..12: note = Severe acute respiratory syndrome coronavirus 2
LFQHANLDSCKR

SEQ ID NO: 22473 - protein, 10 aa, Severe acute respiratory syndrome-related coronavirus
  REGION 1..10: note = Table B: HLA-DRB1*08:01L HLA-DPA1*01:02-B1*04:01L
  source 1..10: note = Severe acute respiratory syndrome coronavirus 2
SYEQFKKGVQ

SEQ ID NO: 22474 - protein, 13 aa, Severe acute respiratory syndrome-related coronavirus
  REGION 1..13: note = Table B: HLA-DRB1*08:01L HLA-DQA1*05:05-B1*03:19L HLA-DPA1*03:01-B1*105:01L HLA-DQA1*05:05-B1*03:01L HLA-DQA1*01:03-B1*06:01L HLA-DQA1*02:01-B1*03:03L
  source 1..13: note = Severe acute respiratory syndrome coronavirus 2
HGTFTCASEYTGN

SEQ ID NO: 22475 - protein, 15 aa, Severe acute respiratory syndrome-related coronavirus
  REGION 1..15: note = Table B: HLA-DRB1*08:01L HLA-DRB1*04:08L
  source 1..15: note = Severe acute respiratory syndrome coronavirus 2
DGALLTKSSEYKGPI

SEQ ID NO: 22476 - protein, 12 aa, Severe acute respiratory syndrome-related coronavirus
  REGION 1..12: note = Table B: HLA-DRB1*08:01L HLA-DQA1*03:01-B1*03:02L
  source 1..12: note = Severe acute respiratory syndrome coronavirus 2
DPKLDNYYKKDN

SEQ ID NO: 22477 - protein, 13 aa, Severe acute respiratory syndrome-related coronavirus
  REGION 1..13: note = Table B: HLA-DRB1*08:01L
  source 1..13: note = Severe acute respiratory syndrome coronavirus 2
HKPIVWHVNNATN

SEQ ID NO: 22478 - protein, 11 aa, Severe acute respiratory syndrome-related coronavirus
  REGION 1..11: note = Table B: HLA-DRB1*08:01L
  source 1..11: note = Severe acute respiratory syndrome coronavirus 2
TTEVVGDIILK

SEQ ID NO: 22479 - protein, 11 aa, Severe acute respiratory syndrome-related coronavirus
  REGION 1..11: note = Table B: HLA-DRB1*08:01L HLA-DPA1*01:03-B1*04:01L HLA-DRB1*04:10L HLA-DRB1*09:01L
  source 1..11: note = Severe acute respiratory syndrome coronavirus 2
AYVDNSSLTIK

SEQ ID NO: 22480 - protein, 12 aa, Severe acute respiratory syndrome-related coronavirus
  REGION 1..12: note = Table B: HLA-DRB1*08:01L HLA-DQA1*01:03-B1*06:01L HLA-DRB1*15:03L
  source 1..12: note = Severe acute respiratory syndrome coronavirus 2
RVLGLKTLATHG

SEQ ID NO: 22481 - protein, 13 aa, Severe acute respiratory syndrome-related coronavirus
  REGION 1..13: note = Table B: HLA-DRB1*08:01L
  source 1..13: note = Severe acute respiratory syndrome coronavirus 2
AKPFLNKVVSTTT

SEQ ID NO: 22482 - protein, 10 aa, Severe acute respiratory syndrome-related coronavirus
  REGION 1..10: note = Table B: HLA-DRB1*08:01L
  source 1..10: note = Severe acute respiratory syndrome coronavirus 2
WKSYVHVVDG

SEQ ID NO: 22483 - protein, 14 aa, Severe acute respiratory syndrome-related coronavirus
  REGION 1..14: note = Table B: HLA-DRB1*08:01L
  source 1..14: note = Severe acute respiratory syndrome coronavirus 2
ARDLSLQFKRPINP

SEQ ID NO: 22484 - protein, 16 aa, Severe acute respiratory syndrome-related coronavirus
  REGION 1..16: note = Table B: HLA-DRB1*08:01L HLA-DPA1*01:03-B1*104:01L
  source 1..16: note = Severe acute respiratory syndrome coronavirus 2
NPTDQSSYIVDSVTVK

SEQ ID NO: 22485 - protein, 12 aa, Severe acute respiratory syndrome-related coronavirus
  REGION 1..12: note = Table B: HLA-DRB1*08:01L
  source 1..12: note = Severe acute respiratory syndrome coronavirus 2
FDKAGQKTYERH

SEQ ID NO: 22486 - protein, 11 aa, Severe acute respiratory syndrome-related coronavirus
  REGION 1..11: note = Table B: HLA-DRB1*08:01L
  source 1..11: note = Severe acute respiratory syndrome coronavirus 2
HFVNLDNLRAN

SEQ ID NO: 22487 - protein, 13 aa, Severe acute respiratory syndrome-related coronavirus
  REGION 1..13: note = Table B: HLA-DRB1*08:01L
  source 1..13: note = Severe acute respiratory syndrome coronavirus 2
FVNLDNLRANNTK

SEQ ID NO: 22488 - protein, 11 aa, Severe acute respiratory syndrome-related coronavirus
  REGION 1..11: note = Table B: HLA-DRB1*08:01L
  source 1..11: note = Severe acute respiratory syndrome coronavirus 2
LSTFISAARQG

SEQ ID NO: 22489 - protein, 14 aa, Severe acute respiratory syndrome-related coronavirus
  REGION 1..14: note = Table B: HLA-DRB1*08:01L HLA-DPA1*01:02-B1*04:01L
  source 1..14: note = Severe acute respiratory syndrome coronavirus 2
AARQGFVDSDVETK

SEQ ID NO: 22490 - protein, 14 aa, Severe acute respiratory syndrome-related coronavirus
  REGION 1..14: note = Table B: HLA-DRB1*08:01L HLA-DQA1*05:05-B1*03:01L
  source 1..14: note = Severe acute respiratory syndrome coronavirus 2
DSDVETKDVVECLK

SEQ ID NO: 22491 - protein, 12 aa, Severe acute respiratory syndrome-related coronavirus
  REGION 1..12: note = Table B: HLA-DRB1*08:01L HLA-DRB1*15:03L
  source 1..12: note = Severe acute respiratory syndrome coronavirus 2
RHINAQVAKSHN

SEQ ID NO: 22492 - protein, 12 aa, Severe acute respiratory syndrome-related coronavirus
  REGION 1..12: note = Table B: HLA-DRB1*08:01L
  source 1..12: note = Severe acute respiratory syndrome coronavirus 2
INAQVAKSHNIA

SEQ ID NO: 22493 - protein, 13 aa, Severe acute respiratory syndrome-related coronavirus
  REGION 1..13: note = Table B: HLA-DRB1*08:01L
  source 1..13: note = Severe acute respiratory syndrome coronavirus 2
IALKGGKIVNNWL

SEQ ID NO: 22494 - protein, 14 aa, Severe acute respiratory syndrome-related coronavirus
  REGION 1..14: note = Table B: HLA-DRB1*08:01L HLA-DRB1*11:01L HLA-DRB3*01:01L
  source 1..14: note = Severe acute respiratory syndrome coronavirus 2
IFYLITPVHVMSKH

SEQ ID NO: 22495 - protein, 12 aa, Severe acute respiratory syndrome-related coronavirus
  REGION 1..12: note = Table B: HLA-DRB1*08:01L
  source 1..12: note = Severe acute respiratory syndrome coronavirus 2
TCFANKHADFDT

SEQ ID NO: 22496 - protein, 14 aa, Severe acute respiratory syndrome-related coronavirus
  REGION 1..14: note = Table B: HLA-DRB1*08:01L
  source 1..14: note = Severe acute respiratory syndrome coronavirus 2
ADFDTWFSQRGGSY

SEQ ID NO: 22497 - protein, 14 aa, Severe acute respiratory syndrome-related coronavirus
  REGION 1..14: note = Table B: HLA-DRB1*08:01L HLA-DRB1*13:01L HLA-DRB1*09:01L HLA-DRB1*08:02L
  source 1..14: note = Severe acute respiratory syndrome coronavirus 2
RYVLMDGSIIQFPN

SEQ ID NO: 22498 - protein, 14 aa, Severe acute respiratory syndrome-related coronavirus
  REGION 1..14: note = Table B: HLA-DRB1*08:01L HLA-DRB3*01:01L HLA-DRB1*15:01L
  source 1..14: note = Severe acute respiratory syndrome coronavirus 2
VRVVTTFDSEYCRH

SEQ ID NO: 22499 - protein, 13 aa, Severe acute respiratory syndrome-related coronavirus
  REGION 1..13: note = Table B: HLA-DRB1*08:01L
  source 1..13: note = Severe acute respiratory syndrome coronavirus 2
YFMRFRRAFGEYS

SEQ ID NO: 22500 - protein, 12 aa, Severe acute respiratory syndrome-related coronavirus
  REGION 1..12: note = Table B: HLA-DRB1*08:01L
  source 1..12: note = Severe acute respiratory syndrome coronavirus 2
SNYLKRRVVFNG

SEQ ID NO: 22501 - protein, 13 aa, Severe acute respiratory syndrome-related coronavirus
  REGION 1..13: note = Table B: HLA-DRB1*08:01L HLA-DPA1*01:03-B1*02:01L HLA-DPA1*01:03-B1*104:01L
  source 1..13: note = Severe acute respiratory syndrome coronavirus 2
VVFNGVSFSTFEE

SEQ ID NO: 22502 - protein, 13 aa, Severe acute respiratory syndrome-related coronavirus
  REGION 1..13: note = Table B: HLA-DRB1*08:01L
  source 1..13: note = Severe acute respiratory syndrome coronavirus 2
NKEMYLKLRSDVL

SEQ ID NO: 22503 - protein, 14 aa, Severe acute respiratory syndrome-related coronavirus
  REGION 1..14: note = Table B: HLA-DRB1*08:01L
  source 1..14: note = Severe acute respiratory syndrome coronavirus 2
PLTQYNRYLALYNK

SEQ ID NO: 22504 - protein, 12 aa, Severe acute respiratory syndrome-related coronavirus
  REGION 1..12: note = Table B: HLA-DRB1*08:01L HLA-DRB1*04:08L
  source 1..12: note = Severe acute respiratory syndrome coronavirus 2
QSGFRKMAFPSG

SEQ ID NO: 22505 - protein, 14 aa, Severe acute respiratory syndrome-related coronavirus
  REGION 1..14: note = Table B: HLA-DRB1*08:01L HLA-DRB1*12:01L HLA-DPA1*01:02-B1*04:01L HLA-DRB1*15:03L
  source 1..14: note = Severe acute respiratory syndrome coronavirus 2
LRVIGHSMQNCVLK

SEQ ID NO: 22506 - protein, 11 aa, Severe acute respiratory syndrome-related coronavirus
  REGION 1..11: note = Table B: HLA-DRB1*08:01L HLA-DQA1*01-B1*05L HLA-DQA1*03:01-B1*03:02L
  source 1..11: note = Severe acute respiratory syndrome coronavirus 2
RPNFTIKGSFL

SEQ ID NO: 22507 - protein, 14 aa, Severe acute respiratory syndrome-related coronavirus
  REGION 1..14: note = Table B: HLA-DRB1*08:01L HLA-DPA1*03:01-B1*105:01L
  source 1..14: note = Severe acute respiratory syndrome coronavirus 2
VSFCYMHHMELPTG

SEQ ID NO: 22508 - protein, 13 aa, Severe acute respiratory syndrome-related coronavirus
  REGION 1..13: note = Table B: HLA-DRB1*08:01L HLA-DPA1*01:03-B1*04:02L
  source 1..13: note = Severe acute respiratory syndrome coronavirus 2
VDRQTAQAAGTDT

SEQ ID NO: 22509 - protein, 12 aa, Severe acute respiratory syndrome-related coronavirus
  REGION 1..12: note = Table B: HLA-DRB1*08:01L HLA-DRB1*12:01L
  source 1..12: note = Severe acute respiratory syndrome coronavirus 2
DRWFLNRFTTTL

SEQ ID NO: 22510 - protein, 11 aa, Severe acute respiratory syndrome-related coronavirus
  REGION 1..11: note = Table B: HLA-DRB1*08:01L
  source 1..11: note = Severe acute respiratory syndrome coronavirus 2
KYNYEPLTQDH

SEQ ID NO: 22511 - protein, 11 aa, Severe acute respiratory syndrome-related coronavirus
  REGION 1..11: note = Table B: HLA-DRB1*08:01L
  source 1..11: note = Severe acute respiratory syndrome coronavirus 2
TFQSAVKRTIK

SEQ ID NO: 22512 - protein, 13 aa, Severe acute respiratory syndrome-related coronavirus
  REGION 1..13: note = Table B: HLA-DRB1*08:01L
  source 1..13: note = Severe acute respiratory syndrome coronavirus 2
FRYMNSQGLLPPK

SEQ ID NO: 22513 - protein, 15 aa, Severe acute respiratory syndrome-related coronavirus
  REGION 1..15: note = Table B: HLA-DRB1*08:01L HLA-DQA1*05:05-B1*03:19L
  source 1..15: note = Severe acute respiratory syndrome coronavirus 2
VQLHNDILLAKDTTE

SEQ ID NO: 22514 - protein, 12 aa, Severe acute respiratory syndrome-related coronavirus
  REGION 1..12: note = Table B: HLA-DRB1*08:01L
  source 1..12: note = Severe acute respiratory syndrome coronavirus 2
GDSEVVLKKLKK

SEQ ID NO: 22515 - protein, 12 aa, Severe acute respiratory syndrome-related coronavirus
  REGION 1..12: note = Table B: HLA-DRB1*08:01L
  source 1..12: note = Severe acute respiratory syndrome coronavirus 2
VLKKLKKSLNVA

SEQ ID NO: 22516 - protein, 13 aa, Severe acute respiratory syndrome-related coronavirus
  REGION 1..13: note = Table B: HLA-DRB1*08:01L
  source 1..13: note = Severe acute respiratory syndrome coronavirus 2
AAMQRKLEKMADQ

SEQ ID NO: 22517 - protein, 14 aa, Severe acute respiratory syndrome-related coronavirus
  REGION 1..14: note = Table B: HLA-DRB1*08:01L HLA-DRB1*04:08L
  source 1..14: note = Severe acute respiratory syndrome coronavirus 2
RSEDKRAKVTSAMQ

SEQ ID NO: 22518 - protein, 10 aa, Severe acute respiratory syndrome-related coronavirus
  REGION 1..10: note = Table B: HLA-DRB1*08:01L
  source 1..10: note = Severe acute respiratory syndrome coronavirus 2
FTMLRKLDND

SEQ ID NO: 22519 - protein, 14 aa, Severe acute respiratory syndrome-related coronavirus
  REGION 1..14: note = Table B: HLA-DRB1*08:01L HLA-DRB4*01:01L HLA-DPA1*01:03-B1*104:01L HLA-DRB1*10:01L HLA-DRB1*08:03L
  source 1..14: note = Severe acute respiratory syndrome coronavirus 2
ADSKIVQLSEISMD

SEQ ID NO: 22520 - protein, 14 aa, Severe acute respiratory syndrome-related coronavirus
  REGION 1..14: note = Table B: HLA-DRB1*08:01L HLA-DRB5*01:01L HLA-DRB4*02:01NL HLA-DPA1*01:03-B1*04:02L HLA-DPA1*01:03-B1*02:01L HLA-DRB1*08:02L
  source 1..14: note = Severe acute respiratory syndrome coronavirus 2
VTALRANSAVKLQN

SEQ ID NO: 22521 - protein, 12 aa, Severe acute respiratory syndrome-related coronavirus
  REGION 1..12: note = Table B: HLA-DRB1*08:01L HLA-DRB1*04:08L
  source 1..12: note = Severe acute respiratory syndrome coronavirus 2
KWARFPKSDGTG

SEQ ID NO: 22522 - protein, 11 aa, Severe acute respiratory syndrome-related coronavirus
  REGION 1..11: note = Table B: HLA-DRB1*08:01L HLA-DRB1*12:01L HLA-DRB1*14:17L
  source 1..11: note = Severe acute respiratory syndrome coronavirus 2
VTDTPKGPKVK

SEQ ID NO: 22523 - protein, 13 aa, Severe acute respiratory syndrome-related coronavirus
  REGION 1..13: note = Table B: HLA-DRB1*08:01L HLA-DRB1*11:01L
  source 1..13: note = Severe acute respiratory syndrome coronavirus 2
AYKDYLASGGQPI

SEQ ID NO: 22524 - protein, 14 aa, Severe acute respiratory syndrome-related coronavirus
  REGION 1..14: note = Table B: HLA-DRB1*08:01L HLA-DPA1*01:03-B1*04:02L
  source 1..14: note = Severe acute respiratory syndrome coronavirus 2
TGTGQAITVTPEAN

SEQ ID NO: 22525 - protein, 13 aa, Severe acute respiratory syndrome-related coronavirus
  REGION 1..13: note = Table B: HLA-DRB1*08:01L
  source 1..13: note = Severe acute respiratory syndrome coronavirus 2
NDKVAGFAKFLKT

SEQ ID NO: 22526 - protein, 15 aa, Severe acute respiratory syndrome-related coronavirus
  REGION 1..15: note = Table B: HLA-DRB1*08:01L
  source 1..15: note = Severe acute respiratory syndrome coronavirus 2
LKTNCCRFQEKDEDD

SEQ ID NO: 22527 - protein, 13 aa, Severe acute respiratory syndrome-related coronavirus
  REGION 1..13: note = Table B: HLA-DRB1*08:01L
  source 1..13: note = Severe acute respiratory syndrome coronavirus 2
NCCRFQEKDEDDN

SEQ ID NO: 22528 - protein, 11 aa, Severe acute respiratory syndrome-related coronavirus
  REGION 1..11: note = Table B: HLA-DRB1*08:01L
  source 1..11: note = Severe acute respiratory syndrome coronavirus 2
SYFVVKRHTFS

SEQ ID NO: 22529 - protein, 11 aa, Severe acute respiratory syndrome-related coronavirus
  REGION 1..11: note = Table B: HLA-DRB1*08:01L
  source 1..11: note = Severe acute respiratory syndrome coronavirus 2
YFVVKRHTFSN

SEQ ID NO: 22530 - protein, 14 aa, Severe acute respiratory syndrome-related coronavirus
  REGION 1..14: note = Table B: HLA-DRB1*08:01L HLA-DPA1*02:01-B1*13:01L
  source 1..14: note = Severe acute respiratory syndrome coronavirus 2
LKDCPAVAKHDFFK

SEQ ID NO: 22531 - protein, 14 aa, Severe acute respiratory syndrome-related coronavirus
  REGION 1..14: note = Table B: HLA-DRB1*08:01L HLA-DPA1*02:01-B1*13:01L
  source 1..14: note = Severe acute respiratory syndrome coronavirus 2
AKHDFFKFRIDGDM

SEQ ID NO: 22532 - protein, 11 aa, Severe acute respiratory syndrome-related coronavirus
  REGION 1..11: note = Table B: HLA-DRB1*08:01L
  source 1..11: note = Severe acute respiratory syndrome coronavirus 2
DLVYALRHFDE

SEQ ID NO: 22533 - protein, 11 aa, Severe acute respiratory syndrome-related coronavirus
  REGION 1..11: note = Table B: HLA-DRB1*08:01L
  source 1..11: note = Severe acute respiratory syndrome coronavirus 2
LVYALRHFDEG

SEQ ID NO: 22534 - protein, 15 aa, Severe acute respiratory syndrome-related coronavirus
  REGION 1..15: note = Table B: HLA-DRB1*08:01L
  source 1..15: note = Severe acute respiratory syndrome coronavirus 2
AGIVGVLTLDNQDLN

SEQ ID NO: 22535 - protein, 14 aa, Severe acute respiratory syndrome-related coronavirus
  REGION 1..14: note = Table B: HLA-DRB1*08:01L
  source 1..14: note = Severe acute respiratory syndrome coronavirus 2
IVGVLTLDNQDLNG

SEQ ID NO: 22536 - protein, 14 aa, Severe acute respiratory syndrome-related coronavirus
  REGION 1..14: note = Table B: HLA-DRB1*08:01L HLA-DRB1*11:01L
  source 1..14: note = Severe acute respiratory syndrome coronavirus 2
TTPGSGVPVVDSYY

SEQ ID NO: 22537 - protein, 12 aa, Severe acute respiratory syndrome-related coronavirus
  REGION 1..12: note = Table B: HLA-DRB1*08:01L HLA-DQA1*01-B1*05L HLA-DPA1*03:01-B1*105:01L HLA-DPA1*01:02-B1*04:01L HLA-DRB1*16:01L
  source 1..12: note = Severe acute respiratory syndrome coronavirus 2
WDLLKYDFTEER

SEQ ID NO: 22538 - protein, 13 aa, Severe acute respiratory syndrome-related coronavirus
  REGION 1..13: note = Table B: HLA-DRB1*08:01L HLA-DRB1*04:08L
  source 1..13: note = Severe acute respiratory syndrome coronavirus 2
YDFTEERLKLFDR

SEQ ID NO: 22539 - protein, 12 aa, Severe acute respiratory syndrome-related coronavirus
  REGION 1..12: note = Table B: HLA-DRB1*08:01L
  source 1..12: note = Severe acute respiratory syndrome coronavirus 2
EERLKLFDRYFK

SEQ ID NO: 22540 - protein, 12 aa, Severe acute respiratory syndrome-related coronavirus
  REGION 1..12: note = Table B: HLA-DRB1*08:01L
  source 1..12: note = Severe acute respiratory syndrome coronavirus 2
KLFDRYFKYWDQ

SEQ ID NO: 22541 - protein, 13 aa, Severe acute respiratory syndrome-related coronavirus
  REGION 1..13: note = Table B: HLA-DRB1*08:01L
  source 1..13: note = Severe acute respiratory syndrome coronavirus 2
KYWDQTYHPNCVN

SEQ ID NO: 22542 - protein, 11 aa, Severe acute respiratory syndrome-related coronavirus
  REGION 1..11: note = Table B: HLA-DRB1*08:01L HLA-DRB1*16:01L HLA-DRB1*04:08L
  source 1..11: note = Severe acute respiratory syndrome coronavirus 2
GYHFRELGVVH

SEQ ID NO: 22543 - protein, 13 aa, Severe acute respiratory syndrome-related coronavirus
  REGION 1..13: note = Table B: HLA-DRB1*08:01L
  source 1..13: note = Severe acute respiratory syndrome coronavirus 2
VVHNQDVNLHSSR

SEQ ID NO: 22544 - protein, 14 aa, Severe acute respiratory syndrome-related coronavirus
  REGION 1..14: note = Table B: HLA-DRB1*08:01L HLA-DPA1*02:01-B1*13:01L
  source 1..14: note = Severe acute respiratory syndrome coronavirus 2
VELKHFFFAQDGNA

SEQ ID NO: 22545 - protein, 14 aa, Severe acute respiratory syndrome-related coronavirus
  REGION 1..14: note = Table B: HLA-DRB1*08:01L HLA-DRB1*13:01L HLA-DRB1*07:01L
  source 1..14: note = Severe acute respiratory syndrome coronavirus 2
FFAQDGNAAISDYD

SEQ ID NO: 22546 - protein, 13 aa, Severe acute respiratory syndrome-related coronavirus
  REGION 1..13: note = Table B: HLA-DRB1*08:01L HLA-DRB1*11:01L HLA-DPA1*01:03-B1*04:02L HLA-DRB3*01:01L HLA-DPA1*02:01-B1*13:01L HLA-DQA1*01:03-B1*06:01L
  source 1..13: note = Severe acute respiratory syndrome coronavirus 2
IVNNLDKSAGFPF

SEQ ID NO: 22547 - protein, 14 aa, Severe acute respiratory syndrome-related coronavirus
  REGION 1..14: note = Table B: HLA-DRB1*08:01L
  source 1..14: note = Severe acute respiratory syndrome coronavirus 2
NLDKSAGFPFNKWG

SEQ ID NO: 22548 - protein, 14 aa, Severe acute respiratory syndrome-related coronavirus
  REGION 1..14: note = Table B: HLA-DRB1*08:01L
  source 1..14: note = Severe acute respiratory syndrome coronavirus 2
NKWGKARLYYDSMS

SEQ ID NO: 22549 - protein, 16 aa, Severe acute respiratory syndrome-related coronavirus
  REGION 1..16: note = Table B: HLA-DRB1*08:01L HLA-DRB1*09:01L HLA-DRB1*07:01L HLA-DRB1*08:02L HLA-DRB1*08:03L
  source 1..16: note = Severe acute respiratory syndrome coronavirus 2
DSMSYEDQDALFAYTK

SEQ ID NO: 22550 - protein, 14 aa, Severe acute respiratory syndrome-related coronavirus
  REGION 1..14: note = Table B: HLA-DRB1*08:01L HLA-DRB1*12:01L HLA-DRB1*16:01L HLA-DRB1*15:03L
  source 1..14: note = Severe acute respiratory syndrome coronavirus 2
DQDALFAYTKRNVI

SEQ ID NO: 22551 - protein, 13 aa, Severe acute respiratory syndrome-related coronavirus
  REGION 1..13: note = Table B: HLA-DRB1*08:01L
  source 1..13: note = Severe acute respiratory syndrome coronavirus 2
ITQMNLKYAISAK

SEQ ID NO: 22552 - protein, 13 aa, Severe acute respiratory syndrome-related coronavirus
  REGION 1..13: note = Table B: HLA-DRB1*08:01L
  source 1..13: note = Severe acute respiratory syndrome coronavirus 2
RQFHQKLLKSIAA

SEQ ID NO: 22553 - protein, 13 aa, Severe acute respiratory syndrome-related coronavirus
  REGION 1..13: note = Table B: HLA-DRB1*08:01L
  source 1..13: note = Severe acute respiratory syndrome coronavirus 2
ATVVIGTSKFYGG

SEQ ID NO: 22554 - protein, 15 aa, Severe acute respiratory syndrome-related coronavirus
  REGION 1..15: note = Table B: HLA-DRB1*08:01L HLA-DRB1*15:03L
  source 1..15: note = Severe acute respiratory syndrome coronavirus 2
VRNLQHRLYECLYRN

SEQ ID NO: 22555 - protein, 11 aa, Severe acute respiratory syndrome-related coronavirus
  REGION 1..11: note = Table B: HLA-DRB1*08:01L
  source 1..11: note = Severe acute respiratory syndrome coronavirus 2
RLYECLYRNRD

SEQ ID NO: 22556 - protein, 11 aa, Severe acute respiratory syndrome-related coronavirus
  REGION 1..11: note = Table B: HLA-DRB1*08:01L
  source 1..11: note = Severe acute respiratory syndrome coronavirus 2
YECLYRNRDVD

SEQ ID NO: 22557 - protein, 14 aa, Severe acute respiratory syndrome-related coronavirus
  REGION 1..14: note = Table B: HLA-DRB1*08:01L
  source 1..14: note = Severe acute respiratory syndrome coronavirus 2
ECLYRNRDVDTDFV

SEQ ID NO: 22558 - protein, 10 aa, Severe acute respiratory syndrome-related coronavirus
  REGION 1..10: note = Table B: HLA-DRB1*08:01L HLA-DPA1*01:02-B1*04:01L
  source 1..10: note = Severe acute respiratory syndrome coronavirus 2
FYAYLRKHFS

SEQ ID NO: 22559 - protein, 11 aa, Severe acute respiratory syndrome-related coronavirus
  REGION 1..11: note = Table B: HLA-DRB1*08:01L
  source 1..11: note = Severe acute respiratory syndrome coronavirus 2
MSYYCKSHKPP

SEQ ID NO: 22560 - protein, 12 aa, Severe acute respiratory syndrome-related coronavirus
  REGION 1..12: note = Table B: HLA-DRB1*08:01L HLA-DRB1*12:01L HLA-DRB1*04:08L HLA-DRB1*15:03L
  source 1..12: note = Severe acute respiratory syndrome coronavirus 2
HLSWEVGKPRPP

SEQ ID NO: 22561 - protein, 13 aa, Severe acute respiratory syndrome-related coronavirus
  REGION 1..13: note = Table B: HLA-DRB1*08:01L HLA-DPA1*03:01-B1*105:01L
  source 1..13: note = Severe acute respiratory syndrome coronavirus 2
LSWEVGKPRPPLN

SEQ ID NO: 22562 - protein, 14 aa, Severe acute respiratory syndrome-related coronavirus
  REGION 1..14: note = Table B: HLA-DRB1*08:01L
  source 1..14: note = Severe acute respiratory syndrome coronavirus 2
AQCFKMFYKGVITH

SEQ ID NO: 22563 - protein, 13 aa, Severe acute respiratory syndrome-related coronavirus
  REGION 1..13: note = Table B: HLA-DRB1*08:01L HLA-DRB1*12:01L HLA-DRB1*04:08L
  source 1..13: note = Severe acute respiratory syndrome coronavirus 2
DRDLYDKLQFTSL

SEQ ID NO: 22564 - protein, 14 aa, Severe acute respiratory syndrome-related coronavirus
  REGION 1..14: note = Table B: HLA-DRB1*08:01L HLA-DRB3*01:01L HLA-DRB1*07:01L
  source 1..14: note = Severe acute respiratory syndrome coronavirus 2
KVITGLHPTQAPTH

SEQ ID NO: 22565 - protein, 12 aa, Severe acute respiratory syndrome-related coronavirus
  REGION 1..12: note = Table B: HLA-DRB1*08:01L
  source 1..12: note = Severe acute respiratory syndrome coronavirus 2
SRVSAKPPPGDQ

SEQ ID NO: 22566 - protein, 14 aa, Severe acute respiratory syndrome-related coronavirus
  REGION 1..14: note = Table B: HLA-DRB1*08:01L HLA-DPA1*01:03-B1*04:02L
  source 1..14: note = Severe acute respiratory syndrome coronavirus 2
KHLIPLMYKGLPWN

SEQ ID NO: 22567 - protein, 13 aa, Severe acute respiratory syndrome-related coronavirus
  REGION 1..13: note = Table B: HLA-DRB1*08:01L
  source 1..13: note = Severe acute respiratory syndrome coronavirus 2
RIKIVQMLSDTLK

SEQ ID NO: 22568 - protein, 13 aa, Severe acute respiratory syndrome-related coronavirus
  REGION 1..13: note = Table B: HLA-DRB1*08:01L HLA-DQA1*05:05-B1*03:01L
  source 1..13: note = Severe acute respiratory syndrome coronavirus 2
VLWAHGFELTSMK

SEQ ID NO: 22569 - protein, 11 aa, Severe acute respiratory syndrome-related coronavirus
  REGION 1..11: note = Table B: HLA-DRB1*08:01L
  source 1..11: note = Severe acute respiratory syndrome coronavirus 2
KINAACRKVQH

SEQ ID NO: 22570 - protein, 16 aa, Severe acute respiratory syndrome-related coronavirus
  REGION 1..16: note = Table B: HLA-DRB1*08:01L HLA-DRB1*04:08L
  source 1..16: note = Severe acute respiratory syndrome coronavirus 2
VDRYPANSIVCRFDTR

SEQ ID NO: 22571 - protein, 14 aa, Severe acute respiratory syndrome-related coronavirus
  REGION 1..14: note = Table B: HLA-DRB1*08:01L
  source 1..14: note = Severe acute respiratory syndrome coronavirus 2
RFDTRVLSNLNLPG

SEQ ID NO: 22572 - protein, 14 aa, Severe acute respiratory syndrome-related coronavirus
  REGION 1..14: note = Table B: HLA-DRB1*08:01L HLA-DQA1*05:05-B1*03:01L
  source 1..14: note = Severe acute respiratory syndrome coronavirus 2
FYYSDSPCESHGKQ

SEQ ID NO: 22573 - protein, 13 aa, Severe acute respiratory syndrome-related coronavirus
  REGION 1..13: note = Table B: HLA-DRB1*08:01L HLA-DRB1*16:01L HLA-DRB1*04:08L
  source 1..13: note = Severe acute respiratory syndrome coronavirus 2
FELWAKRNIKPVP

SEQ ID NO: 22574 - protein, 15 aa, Severe acute respiratory syndrome-related coronavirus
  REGION 1..15: note = Table B: HLA-DRB1*08:01L
  source 1..15: note = Severe acute respiratory syndrome coronavirus 2
IGVCSMTDIAKKPTE

SEQ ID NO: 22575 - protein, 14 aa, Severe acute respiratory syndrome-related coronavirus
  REGION 1..14: note = Table B: HLA-DRB1*08:01L
  source 1..14: note = Severe acute respiratory syndrome coronavirus 2
IGEAVKTQFNYYKK

SEQ ID NO: 22576 - protein, 14 aa, Severe acute respiratory syndrome-related coronavirus
  REGION 1..14: note = Table B: HLA-DRB1*08:01L
  source 1..14: note = Severe acute respiratory syndrome coronavirus 2
EAVKTQFNYYKKVD

SEQ ID NO: 22577 - protein, 10 aa, Severe acute respiratory syndrome-related coronavirus
  REGION 1..10: note = Table B: HLA-DRB1*08:01L
  source 1..10: note = Severe acute respiratory syndrome coronavirus 2
QFNYYKKVDG

SEQ ID NO: 22578 - protein, 12 aa, Severe acute respiratory syndrome-related coronavirus
  REGION 1..12: note = Table B: HLA-DRB1*08:01L HLA-DQA1*03:01-B1*03:02L
  source 1..12: note = Severe acute respiratory syndrome coronavirus 2
QEFKPRSQMEID

SEQ ID NO: 22579 - protein, 10 aa, Severe acute respiratory syndrome-related coronavirus
  REGION 1..10: note = Table B: HLA-DRB1*08:01L
  source 1..10: note = Severe acute respiratory syndrome coronavirus 2
EFIERYKLEG

SEQ ID NO: 22580 - protein, 12 aa, Severe acute respiratory syndrome-related coronavirus
  REGION 1..12: note = Table B: HLA-DRB1*08:01L HLA-DRB1*04:08L
  source 1..12: note = Severe acute respiratory syndrome coronavirus 2
ERYKLEGYAFEH

SEQ ID NO: 22581 - protein, 13 aa, Severe acute respiratory syndrome-related coronavirus
  REGION 1..13: note = Table B: HLA-DRB1*08:01L HLA-DRB1*16:01L
  source 1..13: note = Severe acute respiratory syndrome coronavirus 2
LHLLIGLAKRFKE

SEQ ID NO: 22582 - protein, 13 aa, Severe acute respiratory syndrome-related coronavirus
  REGION 1..13: note = Table B: HLA-DRB1*08:01L
  source 1..13: note = Severe acute respiratory syndrome coronavirus 2
KVVKVTIDYTEIS

SEQ ID NO: 22583 - protein, 15 aa, Severe acute respiratory syndrome-related coronavirus
  REGION 1..15: note = Table B: HLA-DRB1*08:01L HLA-DPA1*01:03-B1*04:02L HLA-DPA1*01:03-B1*104:01L
  source 1..15: note = Severe acute respiratory syndrome coronavirus 2
YPKLQSSQAWQPGVA

SEQ ID NO: 22584 - protein, 15 aa, Severe acute respiratory syndrome-related coronavirus
  REGION 1..15: note = Table B: HLA-DRB1*08:01L
  source 1..15: note = Severe acute respiratory syndrome coronavirus 2
STLIGDCATVHTANK

SEQ ID NO: 22585 - protein, 13 aa, Severe acute respiratory syndrome-related coronavirus
  REGION 1..13: note = Table B: HLA-DRB1*08:01L HLA-DPA1*01:03-B1*02:01L
  source 1..13: note = Severe acute respiratory syndrome coronavirus 2
EHSWNADLYKLMG

SEQ ID NO: 22586 - protein, 13 aa, Severe acute respiratory syndrome-related coronavirus
  REGION 1..13: note = Table B: HLA-DRB1*08:01L
  source 1..13: note = Severe acute respiratory syndrome coronavirus 2
AFLIGCNYLGKPR

SEQ ID NO: 22587 - protein, 13 aa, Severe acute respiratory syndrome-related coronavirus
  REGION 1..13: note = Table B: HLA-DRB1*08:01L
  source 1..13: note = Severe acute respiratory syndrome coronavirus 2
LIGCNYLGKPREQ

SEQ ID NO: 22588 - protein, 14 aa, Severe acute respiratory syndrome-related coronavirus
  REGION 1..14: note = Table B: HLA-DRB1*08:01L
  source 1..14: note = Severe acute respiratory syndrome coronavirus 2
IGCNYLGKPREQID

SEQ ID NO: 22589 - protein, 10 aa, Severe acute respiratory syndrome-related coronavirus
  REGION 1..10: note = Table B: HLA-DRB1*08:01L HLA-DQA1*03:01-B1*03:02L
  source 1..10: note = Severe acute respiratory syndrome coronavirus 2
DMSKFPLKLR

SEQ ID NO: 22590 - protein, 11 aa, Severe acute respiratory syndrome-related coronavirus
  REGION 1..11: note = Table B: HLA-DRB1*08:01L HLA-DRB3*01:01L
  source 1..11: note = Severe acute respiratory syndrome coronavirus 2
SLLSKGRLIIR

SEQ ID NO: 22591 - protein, 12 aa, Severe acute respiratory syndrome-related coronavirus
  REGION 1..12: note = Table B: HLA-DRB1*08:01L HLA-DRB3*01:01L
  source 1..12: note = Severe acute respiratory syndrome coronavirus 2
RVVISSDVLVNN

SEQ ID NO: 22592 - protein, 13 aa, Severe acute respiratory syndrome-related coronavirus
  REGION 1..13: note = Table B: HLA-DRB1*08:01L
  source 1..13: note = Severe acute respiratory syndrome coronavirus 2
KRFDNPVLPFNDG

SEQ ID NO: 22593 - protein, 15 aa, Severe acute respiratory syndrome-related coronavirus
  REGION 1..15: note = Table B: HLA-DRB1*08:01L
  source 1..15: note = Severe acute respiratory syndrome coronavirus 2
EFQFCNDPFLGVYYH

SEQ ID NO: 22594 - protein, 12 aa, Severe acute respiratory syndrome-related coronavirus
  REGION 1..12: note = Table B: HLA-DRB1*08:01L HLA-DRB1*04:08L
  source 1..12: note = Severe acute respiratory syndrome coronavirus 2
VYYHKNNKSWME

SEQ ID NO: 22595 - protein, 12 aa, Severe acute respiratory syndrome-related coronavirus
  REGION 1..12: note = Table B: HLA-DRB1*08:01L HLA-DRB1*12:01L HLA-DRB1*04:08L
  source 1..12: note = Severe acute respiratory syndrome coronavirus 2
KSWMESEFRVYS

SEQ ID NO: 22596 - protein, 13 aa, Severe acute respiratory syndrome-related coronavirus
  REGION 1..13: note = Table B: HLA-DRB1*08:01L HLA-DQA1*03:01-B1*03:02L HLA-DPA1*01:02-B1*04:01L HLA-DRB1*16:01L HLA-DQA1*01:03-B1*06:01L
  source 1..13: note = Severe acute respiratory syndrome coronavirus 2
LQPRTFLLKYNEN

SEQ ID NO: 22597 - protein, 12 aa, Severe acute respiratory syndrome-related coronavirus
  REGION 1..12: note = Table B: HLA-DRB1*08:01L
  source 1..12: note = Severe acute respiratory syndrome coronavirus 2
PRTFLLKYNENG

SEQ ID NO: 22598 - protein, 14 aa, Severe acute respiratory syndrome-related coronavirus
  REGION 1..14: note = Table B: HLA-DRB1*08:01L
  source 1..14: note = Severe acute respiratory syndrome coronavirus 2
ETKCTLKSFTVEKG

SEQ ID NO: 22599 - protein, 11 aa, Severe acute respiratory syndrome-related coronavirus
  REGION 1..11: note = Table B: HLA-DRB1*08:01L
  source 1..11: note = Severe acute respiratory syndrome coronavirus 2
GNYNYLYRLFR

SEQ ID NO: 22600 - protein, 12 aa, Severe acute respiratory syndrome-related coronavirus
  REGION 1..12: note = Table B: HLA-DRB1*08:01L
  source 1..12: note = Severe acute respiratory syndrome coronavirus 2
YLYRLFRKSNLK

SEQ ID NO: 22601 - protein, 12 aa, Severe acute respiratory syndrome-related coronavirus
  REGION 1..12: note = Table B: HLA-DRB1*08:01L
  source 1..12: note = Severe acute respiratory syndrome coronavirus 2
LFRKSNLKPFER

SEQ ID NO: 22602 - protein, 13 aa, Severe acute respiratory syndrome-related coronavirus
  REGION 1..13: note = Table B: HLA-DRB1*08:01L
  source 1..13: note = Severe acute respiratory syndrome coronavirus 2
RKSNLKPFERDIS

SEQ ID NO: 22603 - protein, 12 aa, Severe acute respiratory syndrome-related coronavirus
  REGION 1..12: note = Table B: HLA-DRB1*08:01L HLA-DRB4*02:01NL HLA-DRB1*16:01L HLA-DRB1*04:08L
  source 1..12: note = Severe acute respiratory syndrome coronavirus 2
TGTGVLTESNKK

SEQ ID NO: 22604 - protein, 11 aa, Severe acute respiratory syndrome-related coronavirus
  REGION 1..11: note = Table B: HLA-DRB1*08:01L
  source 1..11: note = Severe acute respiratory syndrome coronavirus 2
QTQTNSPRRAR

SEQ ID NO: 22605 - protein, 14 aa, Severe acute respiratory syndrome-related coronavirus
  REGION 1..14: note = Table B: HLA-DRB1*08:01L
  source 1..14: note = Severe acute respiratory syndrome coronavirus 2
TGIAVEQDKNTQEV

SEQ ID NO: 22606 - protein, 13 aa, Severe acute respiratory syndrome-related coronavirus
  REGION 1..13: note = Table B: HLA-DRB1*08:01L
  source 1..13: note = Severe acute respiratory syndrome coronavirus 2
KQIYKTPPIKDFG

SEQ ID NO: 22607 - protein, 14 aa, Severe acute respiratory syndrome-related coronavirus
  REGION 1..14: note = Table B: HLA-DRB1*08:01L HLA-DPA1*01:03-B1*02:01L
  source 1..14: note = Severe acute respiratory syndrome coronavirus 2
KVTLADAGFIKQYG

SEQ ID NO: 22608 - protein, 14 aa, Severe acute respiratory syndrome-related coronavirus
  REGION 1..14: note = Table B: HLA-DRB1*08:01L
  source 1..14: note = Severe acute respiratory syndrome coronavirus 2
WTFGAGAALQIPFA

SEQ ID NO: 22609 - protein, 13 aa, Severe acute respiratory syndrome-related coronavirus
  REGION 1..13: note = Table B: HLA-DRB1*08:01L HLA-DRB1*16:01L HLA-DRB1*15:03L
  source 1..13: note = Severe acute respiratory syndrome coronavirus 2
VLNDILSRLDKVE

SEQ ID NO: 22610 - protein, 12 aa, Severe acute respiratory syndrome-related coronavirus
  REGION 1..12: note = Table B: HLA-DRB1*08:01L
  source 1..12: note = Severe acute respiratory syndrome coronavirus 2
SKRVDFCGKGYH

SEQ ID NO: 22611 - protein, 12 aa, Severe acute respiratory syndrome-related coronavirus
  REGION 1..12: note = Table B: HLA-DRB1*08:01L
  source 1..12: note = Severe acute respiratory syndrome coronavirus 2
HWFVTQRNFYEP

SEQ ID NO: 22612 - protein, 11 aa, Severe acute respiratory syndrome-related coronavirus
  REGION 1..11: note = Table B: HLA-DRB1*08:01L
  source 1..11: note = Severe acute respiratory syndrome coronavirus 2
KEIDRLNEVAK

SEQ ID NO: 22613 - protein, 11 aa, Severe acute respiratory syndrome-related coronavirus
  REGION 1..11: note = Table B: HLA-DRB1*08:01L
  source 1..11: note = Severe acute respiratory syndrome coronavirus 2
RWQLALSKGVH

SEQ ID NO: 22614 - protein, 12 aa, Severe acute respiratory syndrome-related coronavirus
  REGION 1..12: note = Table B: HLA-DRB1*08:01L HLA-DPA1*01:03-B1*04:01L HLA-DRB1*07:01L
  source 1..12: note = Severe acute respiratory syndrome coronavirus 2
NKIVDEPEEHVQ

SEQ ID NO: 22615 - protein, 13 aa, Severe acute respiratory syndrome-related coronavirus
  REGION 1..13: note = Table B: HLA-DRB1*08:01L HLA-DRB1*04:08L
  source 1..13: note = Severe acute respiratory syndrome coronavirus 2
VSLVKPSFYVYSR

SEQ ID NO: 22616 - protein, 13 aa, Severe acute respiratory syndrome-related coronavirus
  REGION 1..13: note = Table B: HLA-DRB1*08:01L
  source 1..13: note = Severe acute respiratory syndrome coronavirus 2
RVKNLNSSRVPDL

SEQ ID NO: 22617 - protein, 11 aa, Severe acute respiratory syndrome-related coronavirus
  REGION 1..11: note = Table B: HLA-DRB1*08:01L
  source 1..11: note = Severe acute respiratory syndrome coronavirus 2
ASFRLFARTRS

SEQ ID NO: 22618 - protein, 11 aa, Severe acute respiratory syndrome-related coronavirus
  REGION 1..11: note = Table B: HLA-DRB1*08:01L
  source 1..11: note = Severe acute respiratory syndrome coronavirus 2
SFRLFARTRSM

SEQ ID NO: 22619 - protein, 14 aa, Severe acute respiratory syndrome-related coronavirus
  REGION 1..14: note = Table B: HLA-DRB1*08:01L
  source 1..14: note = Severe acute respiratory syndrome coronavirus 2
LGRCDIKDLPKEIT

SEQ ID NO: 22620 - protein, 16 aa, Severe acute respiratory syndrome-related coronavirus
  REGION 1..16: note = Table B: HLA-DRB1*08:01L HLA-DPA1*03:01-B1*105:01L HLA-DRB1*15:03L
  source 1..16: note = Severe acute respiratory syndrome coronavirus 2
DIKDLPKEITVATSRT

SEQ ID NO: 22621 - protein, 11 aa, Severe acute respiratory syndrome-related coronavirus
  REGION 1..11: note = Table B: HLA-DRB1*08:01L HLA-DQA1*05:05-B1*03:01L
  source 1..11: note = Severe acute respiratory syndrome coronavirus 2
DSGFAAYSRYR

SEQ ID NO: 22622 - protein, 13 aa, Severe acute respiratory syndrome-related coronavirus
  REGION 1..13: note = Table B: HLA-DRB1*08:01L HLA-DRB1*16:01L HLA-DRB1*04:08L
  source 1..13: note = Severe acute respiratory syndrome coronavirus 2
SRYRIGNYKLNTD

SEQ ID NO: 22623 - protein, 12 aa, Severe acute respiratory syndrome-related coronavirus
  REGION 1..12: note = Table B: HLA-DRB1*08:01L
  source 1..12: note = Severe acute respiratory syndrome coronavirus 2
YHYQECVRGTTV

SEQ ID NO: 22624 - protein, 13 aa, Severe acute respiratory syndrome-related coronavirus
  REGION 1..13: note = Table B: HLA-DRB1*08:01L HLA-DRB1*11:01L HLA-DPA1*01:03-B1*04:01L HLA-DRB1*09:01L HLA-DPA1*01:03-B1*04:02L HLA-DPA1*02:01-B1*13:01L HLA-DRB1*07:01L HLA-DRB1*08:03L
  source 1..13: note = Severe acute respiratory syndrome coronavirus 2
SGTYEGNSPFHPL

SEQ ID NO: 22625 - protein, 15 aa, Severe acute respiratory syndrome-related coronavirus
  REGION 1..15: note = Table B: HLA-DRB1*08:01L
  source 1..15: note = Severe acute respiratory syndrome coronavirus 2
TYEGNSPFHPLADNK

SEQ ID NO: 22626 - protein, 12 aa, Severe acute respiratory syndrome-related coronavirus
  REGION 1..12: note = Table B: HLA-DRB1*08:01L
  source 1..12: note = Severe acute respiratory syndrome coronavirus 2
YSKWYIRVGARK

SEQ ID NO: 22627 - protein, 10 aa, Severe acute respiratory syndrome-related coronavirus
  REGION 1..10: note = Table B: HLA-DRB1*08:01L HLA-DQA1*03:01-B1*03:02L HLA-DRB1*16:01L HLA-DQA1*02:01-B1*03:03L
  source 1..10: note = Severe acute respiratory syndrome coronavirus 2
ARKSAPLIEL

SEQ ID NO: 22628 - protein, 11 aa, Severe acute respiratory syndrome-related coronavirus
  REGION 1..11: note = Table B: HLA-DRB1*08:01L HLA-DRB1*10:01L
  source 1..11: note = Severe acute respiratory syndrome coronavirus 2
WFTALTQHGKE

SEQ ID NO: 22629 - protein, 13 aa, Severe acute respiratory syndrome-related coronavirus
  REGION 1..13: note = Table B: HLA-DRB1*08:01L
  source 1..13: note = Severe acute respiratory syndrome coronavirus 2
NQLESKMSGKGQQ

SEQ ID NO: 22630 - protein, 14 aa, Severe acute respiratory syndrome-related coronavirus
  REGION 1..14: note = Table B: HLA-DRB1*08:01L
  source 1..14: note = Severe acute respiratory syndrome coronavirus 2
SKMSGKGQQQQGQT

SEQ ID NO: 22631 - protein, 10 aa, Severe acute respiratory syndrome-related coronavirus
  REGION 1..10: note = Table B: HLA-DRB1*08:01L HLA-DQA1*03:01-B1*03:02L
  source 1..10: note = Severe acute respiratory syndrome coronavirus 2
AEASKKPRQK

SEQ ID NO: 22632 - protein, 15 aa, Severe acute respiratory syndrome-related coronavirus
  REGION 1..15: note = Table B: HLA-DRB1*08:01L HLA-DRB4*01:01L HLA-DRB1*12:02L
  source 1..15: note = Severe acute respiratory syndrome coronavirus 2
SKQLQQSMSSADSTQ

SEQ ID NO: 22633 - protein, 14 aa, Severe acute respiratory syndrome-related coronavirus
  REGION 1..14: note = Table B: HLA-DRB1*11:01L HLA-DPA1*02:01-B1*13:01L
  source 1..14: note = Severe acute respiratory syndrome coronavirus 2
SLPVLQVRDVLVRG

SEQ ID NO: 22634 - protein, 14 aa, Severe acute respiratory syndrome-related coronavirus
  REGION 1..14: note = Table B: HLA-DRB1*11:01L
  source 1..14: note = Severe acute respiratory syndrome coronavirus 2
QENWNTKHSSGVTR

SEQ ID NO: 22635 - protein, 15 aa, Severe acute respiratory syndrome-related coronavirus
  REGION 1..15: note = Table B: HLA-DRB1*11:01L HLA-DQA1*03:01-B1*03:02L
  source 1..15: note = Severe acute respiratory syndrome coronavirus 2
DTKRGVYCCREHEHE

SEQ ID NO: 22636 - protein, 15 aa, Severe acute respiratory syndrome-related coronavirus
  REGION 1..15: note = Table B: HLA-DRB1*11:01L HLA-DRB1*15:03L
  source 1..15: note = Severe acute respiratory syndrome coronavirus 2
WVPRASANIGCNHTG

SEQ ID NO: 22637 - protein, 14 aa, Severe acute respiratory syndrome-related coronavirus
  REGION 1..14: note = Table B: HLA-DRB1*11:01L HLA-DRB3*01:01L HLA-DQA1*03:01-B1*03:02L HLA-DPA1*01:02-B1*04:01L HLA-DRB1*07:01L
  source 1..14: note = Severe acute respiratory syndrome coronavirus 2
ASANIGCNHTGVVG

SEQ ID NO: 22638 - protein, 14 aa, Severe acute respiratory syndrome-related coronavirus
  REGION 1..14: note = Table B: HLA-DRB1*11:01L
  source 1..14: note = Severe acute respiratory syndrome coronavirus 2
FSASTSAFVETVKG

SEQ ID NO: 22639 - protein, 13 aa, Severe acute respiratory syndrome-related coronavirus
  REGION 1..13: note = Table B: HLA-DRB1*11:01L
  source 1..13: note = Severe acute respiratory syndrome coronavirus 2
GTVYEKLKPVLDW

SEQ ID NO: 22640 - protein, 16 aa, Severe acute respiratory syndrome-related coronavirus
  REGION 1..16: note = Table B: HLA-DRB1*11:01L HLA-DPA1*01:03-B1*04:02L HLA-DRB1*07:01L
  source 1..16: note = Severe acute respiratory syndrome coronavirus 2
LKALNLGETFVTHSKG

SEQ ID NO: 22641 - protein, 13 aa, Severe acute respiratory syndrome-related coronavirus
  REGION 1..13: note = Table B: HLA-DRB1*11:01L HLA-DRB1*04:08L
  source 1..13: note = Severe acute respiratory syndrome coronavirus 2
LYRKCVKSREETG

SEQ ID NO: 22642 - protein, 16 aa, Severe acute respiratory syndrome-related coronavirus
  REGION 1..16: note = Table B: HLA-DRB1*11:01L
  source 1..16: note = Severe acute respiratory syndrome coronavirus 2
TQYEYGTEDDYQGKPL

SEQ ID NO: 22643 - protein, 14 aa, Severe acute respiratory syndrome-related coronavirus
  REGION 1..14: note = Table B: HLA-DRB1*11:01L HLA-DRB1*08:03L
  source 1..14: note = Severe acute respiratory syndrome coronavirus 2
GTEDDYQGKPLEFG

SEQ ID NO: 22644 - protein, 14 aa, Severe acute respiratory syndrome-related coronavirus
  REGION 1..14: note = Table B: HLA-DRB1*11:01L HLA-DRB1*04:10L HLA-DPA1*01:03-B1*104:01L
  source 1..14: note = Severe acute respiratory syndrome coronavirus 2
GGGVAGALNKATNN

SEQ ID NO: 22645 - protein, 13 aa, Severe acute respiratory syndrome-related coronavirus
  REGION 1..13: note = Table B: HLA-DRB1*11:01L
  source 1..13: note = Severe acute respiratory syndrome coronavirus 2
SAFYILPSIISNE

SEQ ID NO: 22646 - protein, 14 aa, Severe acute respiratory syndrome-related coronavirus
  REGION 1..14: note = Table B: HLA-DRB1*11:01L HLA-DRB1*07:01L
  source 1..14: note = Severe acute respiratory syndrome coronavirus 2
NLREMLAHAEETRK

SEQ ID NO: 22647 - protein, 14 aa, Severe acute respiratory syndrome-related coronavirus
  REGION 1..14: note = Table B: HLA-DRB1*11:01L
  source 1..14: note = Severe acute respiratory syndrome coronavirus 2
QRKYKGIKIQEGVV

SEQ ID NO: 22648 - protein, 17 aa, Severe acute respiratory syndrome-related coronavirus
  REGION 1..17: note = Table B: HLA-DRB1*11:01L
  source 1..17: note = Severe acute respiratory syndrome coronavirus 2
MPLGYVTHGLNLEEAAR

SEQ ID NO: 22649 - protein, 14 aa, Severe acute respiratory syndrome-related coronavirus
  REGION 1..14: note = Table B: HLA-DRB1*11:01L HLA-DRB3*01:01L
  source 1..14: note = Severe acute respiratory syndrome coronavirus 2
KVFTTVDNINLHTQ

SEQ ID NO: 22650 - protein, 15 aa, Severe acute respiratory syndrome-related coronavirus
  REGION 1..15: note = Table B: HLA-DRB1*11:01L HLA-DPA1*01:03-B1*104:01L
  source 1..15: note = Severe acute respiratory syndrome coronavirus 2
LRVEAFEYYHTTDPS

SEQ ID NO: 22651 - protein, 13 aa, Severe acute respiratory syndrome-related coronavirus
  REGION 1..13: note = Table B: HLA-DRB1*11:01L HLA-DRB3*01:01L HLA-DPA1*01:03-B1*02:01L
  source 1..13: note = Severe acute respiratory syndrome coronavirus 2
YLFQHANLDSCKR

SEQ ID NO: 22652 - protein, 15 aa, Severe acute respiratory syndrome-related coronavirus
  REGION 1..15: note = Table B: HLA-DRB1*11:01L HLA-DPA1*02:01-B1*13:01L
  source 1..15: note = Severe acute respiratory syndrome coronavirus 2
SKETLYCIDGALLTK

SEQ ID NO: 22653 - protein, 14 aa, Severe acute respiratory syndrome-related coronavirus
  REGION 1..14: note = Table B: HLA-DRB1*11:01L HLA-DRB3*01:01L HLA-DPA1*01:03-B1*104:01L
  source 1..14: note = Severe acute respiratory syndrome coronavirus 2
VDNSSLTIKKPNEL

SEQ ID NO: 22654 - protein, 12 aa, Severe acute respiratory syndrome-related coronavirus
  REGION 1..12: note = Table B: HLA-DRB1*11:01L HLA-DRB1*04:10L HLA-DRB1*08:03L
  source 1..12: note = Severe acute respiratory syndrome coronavirus 2
FISAARQGFVDS

SEQ ID NO: 22655 - protein, 15 aa, Severe acute respiratory syndrome-related coronavirus
  REGION 1..15: note = Table B: HLA-DRB1*11:01L
  source 1..15: note = Severe acute respiratory syndrome coronavirus 2
IALIWNVKDFMSLSE

SEQ ID NO: 22656 - protein, 15 aa, Severe acute respiratory syndrome-related coronavirus
  REGION 1..15: note = Table B: HLA-DRB1*11:01L HLA-DRB3*01:01L
  source 1..15: note = Severe acute respiratory syndrome coronavirus 2
RQVVNVVTTKIALKG

SEQ ID NO: 22657 - protein, 12 aa, Severe acute respiratory syndrome-related coronavirus
  REGION 1..12: note = Table B: HLA-DRB1*11:01L HLA-DRB1*10:01L HLA-DRB1*15:03L
  source 1..12: note = Severe acute respiratory syndrome coronavirus 2
IGYKAIDGGVTR

SEQ ID NO: 22658 - protein, 14 aa, Severe acute respiratory syndrome-related coronavirus
  REGION 1..14: note = Table B: HLA-DRB1*11:01L
  source 1..14: note = Severe acute respiratory syndrome coronavirus 2
YFMRFRRAFGEYSH

SEQ ID NO: 22659 - protein, 15 aa, Severe acute respiratory syndrome-related coronavirus
  REGION 1..15: note = Table B: HLA-DRB1*11:01L
  source 1..15: note = Severe acute respiratory syndrome coronavirus 2
TFLLNKEMYLKLRSD

SEQ ID NO: 22660 - protein, 14 aa, Severe acute respiratory syndrome-related coronavirus
  REGION 1..14: note = Table B: HLA-DRB1*11:01L
  source 1..14: note = Severe acute respiratory syndrome coronavirus 2
KYFSGAMDTTSYRE

SEQ ID NO: 22661 - protein, 13 aa, Severe acute respiratory syndrome-related coronavirus
  REGION 1..13: note = Table B: HLA-DRB1*11:01L
  source 1..13: note = Severe acute respiratory syndrome coronavirus 2
QSGFRKMAFPSGK

SEQ ID NO: 22662 - protein, 15 aa, Severe acute respiratory syndrome-related coronavirus
  REGION 1..15: note = Table B: HLA-DRB1*11:01L HLA-DPA1*01:03-B1*04:01L HLA-DPA1*01:03-B1*02:01L
  source 1..15: note = Severe acute respiratory syndrome coronavirus 2
LNGLWLDDVVYCPRH

SEQ ID NO: 22663 - protein, 14 aa, Severe acute respiratory syndrome-related coronavirus
  REGION 1..14: note = Table B: HLA-DRB1*11:01L
  source 1..14: note = Severe acute respiratory syndrome coronavirus 2
PNYEDLLIRKSNHN

SEQ ID NO: 22664 - protein, 15 aa, Severe acute respiratory syndrome-related coronavirus
  REGION 1..15: note = Table B: HLA-DRB1*11:01L HLA-DPA1*01:03-B1*04:01L HLA-DPA1*01:03-B1*104:01L HLA-DRB1*07:01L
  source 1..15: note = Severe acute respiratory syndrome coronavirus 2
YEPLTQDHVDILGPL

SEQ ID NO: 22665 - protein, 15 aa, Severe acute respiratory syndrome-related coronavirus
  REGION 1..15: note = Table B: HLA-DRB1*11:01L HLA-DPA1*01:03-B1*104:01L
  source 1..15: note = Severe acute respiratory syndrome coronavirus 2
ILGPLSAQTGIAVLD

SEQ ID NO: 22666 - protein, 15 aa, Severe acute respiratory syndrome-related coronavirus
  REGION 1..15: note = Table B: HLA-DRB1*11:01L HLA-DRB3*01:01L HLA-DRB1*04:08L HLA-DRB1*15:03L
  source 1..15: note = Severe acute respiratory syndrome coronavirus 2
VKRTIKGTHHWLLLT

SEQ ID NO: 22667 - protein, 15 aa, Severe acute respiratory syndrome-related coronavirus
  REGION 1..15: note = Table B: HLA-DRB1*11:01L
  source 1..15: note = Severe acute respiratory syndrome coronavirus 2
LDNRATLQAIASEFS

SEQ ID NO: 22668 - protein, 15 aa, Severe acute respiratory syndrome-related coronavirus
  REGION 1..15: note = Table B: HLA-DRB1*11:01L HLA-DPA1*03:01-B1*105:01L
  source 1..15: note = Severe acute respiratory syndrome coronavirus 2
LKKSLNVAKSEFDRD

SEQ ID NO: 22669 - protein, 14 aa, Severe acute respiratory syndrome-related coronavirus
  REGION 1..14: note = Table B: HLA-DRB1*11:01L
  source 1..14: note = Severe acute respiratory syndrome coronavirus 2
EFDRDAAMQRKLEK

SEQ ID NO: 22670 - protein, 14 aa, Severe acute respiratory syndrome-related coronavirus
  REGION 1..14: note = Table B: HLA-DRB1*11:01L
  source 1..14: note = Severe acute respiratory syndrome coronavirus 2
QQVVDADSKIVQLS

SEQ ID NO: 22671 - protein, 13 aa, Severe acute respiratory syndrome-related coronavirus
  REGION 1..13: note = Table B: HLA-DRB1*11:01L HLA-DRB1*13:01L
  source 1..13: note = Severe acute respiratory syndrome coronavirus 2
VVDADSKIVQLSE

SEQ ID NO: 22672 - protein, 14 aa, Severe acute respiratory syndrome-related coronavirus
  REGION 1..14: note = Table B: HLA-DRB1*11:01L
  source 1..14: note = Severe acute respiratory syndrome coronavirus 2
WPLIVTALRANSAV

SEQ ID NO: 22673 - protein, 14 aa, Severe acute respiratory syndrome-related coronavirus
  REGION 1..14: note = Table B: HLA-DRB1*11:01L
  source 1..14: note = Severe acute respiratory syndrome coronavirus 2
KYLYFIKGLNNLNR

SEQ ID NO: 22674 - protein, 14 aa, Severe acute respiratory syndrome-related coronavirus
  REGION 1..14: note = Table B: HLA-DRB1*11:01L
  source 1..14: note = Severe acute respiratory syndrome coronavirus 2
QPITNCVKMLCTHT

SEQ ID NO: 22675 - protein, 17 aa, Severe acute respiratory syndrome-related coronavirus
  REGION 1..17: note = Table B: HLA-DRB1*11:01L
  source 1..17: note = Severe acute respiratory syndrome coronavirus 2
AKHDFFKFRIDGDMVPH

SEQ ID NO: 22676 - protein, 15 aa, Severe acute respiratory syndrome-related coronavirus
  REGION 1..15: note = Table B: HLA-DRB1*11:01L
  source 1..15: note = Severe acute respiratory syndrome coronavirus 2
FKFRIDGDMVPHISR

SEQ ID NO: 22677 - protein, 14 aa, Severe acute respiratory syndrome-related coronavirus
  REGION 1..14: note = Table B: HLA-DRB1*11:01L
  source 1..14: note = Severe acute respiratory syndrome coronavirus 2
TKYTMADLVYALRH

SEQ ID NO: 22678 - protein, 13 aa, Severe acute respiratory syndrome-related coronavirus
  REGION 1..13: note = Table B: HLA-DRB1*11:01L HLA-DRB1*10:01L HLA-DRB1*15:03L
  source 1..13: note = Severe acute respiratory syndrome coronavirus 2
GYHFRELGVVHNQ

SEQ ID NO: 22679 - protein, 13 aa, Severe acute respiratory syndrome-related coronavirus
  REGION 1..13: note = Table B: HLA-DRB1*11:01L HLA-DPA1*01:03-B1*104:01L HLA-DRB1*08:02L
  source 1..13: note = Severe acute respiratory syndrome coronavirus 2
FSVAALTNNVAFQ

SEQ ID NO: 22680 - protein, 17 aa, Severe acute respiratory syndrome-related coronavirus
  REGION 1..17: note = Table B: HLA-DRB1*11:01L HLA-DRB1*08:03L
  source 1..17: note = Severe acute respiratory syndrome coronavirus 2
EGSSVELKHFFFAQDGN

SEQ ID NO: 22681 - protein, 14 aa, Severe acute respiratory syndrome-related coronavirus
  REGION 1..14: note = Table B: HLA-DRB1*11:01L
  source 1..14: note = Severe acute respiratory syndrome coronavirus 2
GFPFNKWGKARLYY

SEQ ID NO: 22682 - protein, 16 aa, Severe acute respiratory syndrome-related coronavirus
  REGION 1..16: note = Table B: HLA-DRB1*11:01L HLA-DRB3*01:01L HLA-DPA1*02:01-B1*13:01L
  source 1..16: note = Severe acute respiratory syndrome coronavirus 2
GVSICSTMTNRQFHQK

SEQ ID NO: 22683 - protein, 16 aa, Severe acute respiratory syndrome-related coronavirus
  REGION 1..16: note = Table B: HLA-DRB1*11:01L HLA-DPA1*01:03-B1*02:01L
  source 1..16: note = Severe acute respiratory syndrome coronavirus 2
WHNMLKTVYSDVENPH

SEQ ID NO: 22684 - protein, 13 aa, Severe acute respiratory syndrome-related coronavirus
  REGION 1..13: note = Table B: HLA-DRB1*11:01L HLA-DRB4*02:01NL HLA-DRB1*04:10L HLA-DPA1*02:01-B1*13:01L HLA-DPA1*01:03-B1*104:01L HLA-DRB1*14:17L
  source 1..13: note = Severe acute respiratory syndrome coronavirus 2
GDATTAYANSVFN

SEQ ID NO: 22685 - protein, 12 aa, Severe acute respiratory syndrome-related coronavirus
  REGION 1..12: note = Table B: HLA-DRB1*11:01L HLA-DRB1*04:08L
  source 1..12: note = Severe acute respiratory syndrome coronavirus 2
RLYECLYRNRDV

SEQ ID NO: 22686 - protein, 15 aa, Severe acute respiratory syndrome-related coronavirus
  REGION 1..15: note = Table B: HLA-DRB1*11:01L
  source 1..15: note = Severe acute respiratory syndrome coronavirus 2
KSVLYYQNNVFMSEA

SEQ ID NO: 22687 - protein, 14 aa, Severe acute respiratory syndrome-related coronavirus
  REGION 1..14: note = Table B: HLA-DRB1*11:01L
  source 1..14: note = Severe acute respiratory syndrome coronavirus 2
HLSWEVGKPRPPLN

SEQ ID NO: 22688 - protein, 15 aa, Severe acute respiratory syndrome-related coronavirus
  REGION 1..15: note = Table B: HLA-DRB1*11:01L
  source 1..15: note = Severe acute respiratory syndrome coronavirus 2
EKGDYGDAVVYRGTT

SEQ ID NO: 22689 - protein, 15 aa, Severe acute respiratory syndrome-related coronavirus
  REGION 1..15: note = Table B: HLA-DRB1*11:01L HLA-DPA1*01:03-B1*04:01L HLA-DPA1*01:03-B1*04:02L HLA-DPA1*01:03-B1*02:01L HLA-DRB1*15:03L
  source 1..15: note = Severe acute respiratory syndrome coronavirus 2
NARLRAKHYVYIGDP

SEQ ID NO: 22690 - protein, 14 aa, Severe acute respiratory syndrome-related coronavirus
  REGION 1..14: note = Table B: HLA-DRB1*11:01L
  source 1..14: note = Severe acute respiratory syndrome coronavirus 2
KHYVYIGDPAQLPA

SEQ ID NO: 22691 - protein, 13 aa, Severe acute respiratory syndrome-related coronavirus
  REGION 1..13: note = Table B: HLA-DRB1*11:01L HLA-DRB4*02:01NL HLA-DRB3*01:01L HLA-DPA1*01:03-B1*02:01L
  source 1..13: note = Severe acute respiratory syndrome coronavirus 2
IVDTVSALVYDNK

SEQ ID NO: 22692 - protein, 16 aa, Severe acute respiratory syndrome-related coronavirus
  REGION 1..16: note = Table B: HLA-DRB1*11:01L
  source 1..16: note = Severe acute respiratory syndrome coronavirus 2
SAQCFKMFYKGVITHD

SEQ ID NO: 22693 - protein, 15 aa, Severe acute respiratory syndrome-related coronavirus
  REGION 1..15: note = Table B: HLA-DRB1*11:01L HLA-DQA1*01:03-B1*06:01L HLA-DQA1*02:01-B1*03:03L
  source 1..15: note = Severe acute respiratory syndrome coronavirus 2
ITRAKVGILCIMSDR

SEQ ID NO: 22694 - protein, 13 aa, Severe acute respiratory syndrome-related coronavirus
  REGION 1..13: note = Table B: HLA-DRB1*11:01L HLA-DRB1*08:03L
  source 1..13: note = Severe acute respiratory syndrome coronavirus 2
KVITGLHPTQAPT

SEQ ID NO: 22695 - protein, 14 aa, Severe acute respiratory syndrome-related coronavirus
  REGION 1..14: note = Table B: HLA-DRB1*11:01L
  source 1..14: note = Severe acute respiratory syndrome coronavirus 2
GYPNMFITREEAIR

SEQ ID NO: 22696 - protein, 15 aa, Severe acute respiratory syndrome-related coronavirus
  REGION 1..15: note = Table B: HLA-DRB1*11:01L HLA-DRB1*15:01L
  source 1..15: note = Severe acute respiratory syndrome coronavirus 2
VPTGYVDTPNNTDFS

SEQ ID NO: 22697 - protein, 13 aa, Severe acute respiratory syndrome-related coronavirus
  REGION 1..13: note = Table B: HLA-DRB1*11:01L
  source 1..13: note = Severe acute respiratory syndrome coronavirus 2
VKAALLADKFPVL

SEQ ID NO: 22698 - protein, 17 aa, Severe acute respiratory syndrome-related coronavirus
  REGION 1..17: note = Table B: HLA-DRB1*11:01L HLA-DPA1*01:03-B1*04:02L HLA-DPA1*01:03-B1*104:01L HLA-DRB1*10:01L
  source 1..17: note = Severe acute respiratory syndrome coronavirus 2
VETFYPKLQSSQAWQPG

SEQ ID NO: 22699 - protein, 12 aa, Severe acute respiratory syndrome-related coronavirus
  REGION 1..12: note = Table B: HLA-DRB1*11:01L
  source 1..12: note = Severe acute respiratory syndrome coronavirus 2
NLYKMQRMLLEK

SEQ ID NO: 22700 - protein, 14 aa, Severe acute respiratory syndrome-related coronavirus
  REGION 1..14: note = Table B: HLA-DRB1*11:01L HLA-DRB3*01:01L
  source 1..14: note = Severe acute respiratory syndrome coronavirus 2
EHSWNADLYKLMGH

SEQ ID NO: 22701 - protein, 13 aa, Severe acute respiratory syndrome-related coronavirus
  REGION 1..13: note = Table B: HLA-DRB1*11:01L HLA-DPA1*01:03-B1*02:01L
  source 1..13: note = Severe acute respiratory syndrome coronavirus 2
DKVFRSSVLHSTQ

SEQ ID NO: 22702 - protein, 16 aa, Severe acute respiratory syndrome-related coronavirus
  REGION 1..16: note = Table B: HLA-DRB1*11:01L HLA-DRB1*08:03L
  source 1..16: note = Severe acute respiratory syndrome coronavirus 2
SNIIRGWIFGTTLDSK

SEQ ID NO: 22703 - protein, 11 aa, Severe acute respiratory syndrome-related coronavirus
  REGION 1..11: note = Table B: HLA-DRB1*11:01L HLA-DRB1*12:01L HLA-DPA1*01:02-B1*04:01L HLA-DRB1*08:02L
  source 1..11: note = Severe acute respiratory syndrome coronavirus 2
REFVFKNIDGY

SEQ ID NO: 22704 - protein, 11 aa, Severe acute respiratory syndrome-related coronavirus
  REGION 1..11: note = Table B: HLA-DRB1*11:01L
  source 1..11: note = Severe acute respiratory syndrome coronavirus 2
YYVGYLQPRTF

SEQ ID NO: 22705 - protein, 13 aa, Severe acute respiratory syndrome-related coronavirus
  REGION 1..13: note = Table B: HLA-DRB1*11:01L
  source 1..13: note = Severe acute respiratory syndrome coronavirus 2
NYLYRLFRKSNLK

SEQ ID NO: 22706 - protein, 14 aa, Severe acute respiratory syndrome-related coronavirus
  REGION 1..14: note = Table B: HLA-DRB1*11:01L
  source 1..14: note = Severe acute respiratory syndrome coronavirus 2
LLQYGSFCTQLNRA

SEQ ID NO: 22707 - protein, 14 aa, Severe acute respiratory syndrome-related coronavirus
  REGION 1..14: note = Table B: HLA-DRB1*11:01L
  source 1..14: note = Severe acute respiratory syndrome coronavirus 2
IANQFNSAIGKIQD

SEQ ID NO: 22708 - protein, 15 aa, Severe acute respiratory syndrome-related coronavirus
  REGION 1..15: note = Table B: HLA-DRB1*11:01L
  source 1..15: note = Severe acute respiratory syndrome coronavirus 2
DVVNQNAQALNTLVK

SEQ ID NO: 22709 - protein, 13 aa, Severe acute respiratory syndrome-related coronavirus
  REGION 1..13: note = Table B: HLA-DRB1*11:01L HLA-DRB1*04:10L HLA-DRB1*15:03L
  source 1..13: note = Severe acute respiratory syndrome coronavirus 2
NDILSRLDKVEAE

SEQ ID NO: 22710 - protein, 15 aa, Severe acute respiratory syndrome-related coronavirus
  REGION 1..15: note = Table B: HLA-DRB1*11:01L HLA-DPA1*01:02-B1*04:01L HLA-DRB1*07:01L HLA-DRB1*16:01L HLA-DRB1*15:03L
  source 1..15: note = Severe acute respiratory syndrome coronavirus 2
AATKMSECVLGQSKR

SEQ ID NO: 22711 - protein, 15 aa, Severe acute respiratory syndrome-related coronavirus
  REGION 1..15: note = Table B: HLA-DRB1*11:01L
  source 1..15: note = Severe acute respiratory syndrome coronavirus 2
GQSKRVDFCGKGYHL

SEQ ID NO: 22712 - protein, 18 aa, Severe acute respiratory syndrome-related coronavirus
  REGION 1..18: note = Table B: HLA-DRB1*11:01L HLA-DPA1*03:01-B1*105:01L
  source 1..18: note = Severe acute respiratory syndrome coronavirus 2
DGKAHFPREGVFVSNGTH

SEQ ID NO: 22713 - protein, 14 aa, Severe acute respiratory syndrome-related coronavirus
  REGION 1..14: note = Table B: HLA-DRB1*11:01L
  source 1..14: note = Severe acute respiratory syndrome coronavirus 2
LIDLQELGKYEQYI

SEQ ID NO: 22714 - protein, 14 aa, Severe acute respiratory syndrome-related coronavirus
  REGION 1..14: note = Table B: HLA-DRB1*11:01L
  source 1..14: note = Severe acute respiratory syndrome coronavirus 2
EEHVQIHTIDGSSG

SEQ ID NO: 22715 - protein, 17 aa, Severe acute respiratory syndrome-related coronavirus
  REGION 1..17: note = Table B: HLA-DRB1*11:01L HLA-DRB4*01:01L
  source 1..17: note = Severe acute respiratory syndrome coronavirus 2
EHVQIHTIDGSSGVVNP

SEQ ID NO: 22716 - protein, 14 aa, Severe acute respiratory syndrome-related coronavirus
  REGION 1..14: note = Table B: HLA-DRB1*11:01L HLA-DQA1*05:05-B1*03:116L HLA-DRB1*15:03L
  source 1..14: note = Severe acute respiratory syndrome coronavirus 2
IDGSSGVVNPVMEP

SEQ ID NO: 22717 - protein, 15 aa, Severe acute respiratory syndrome-related coronavirus
  REGION 1..15: note = Table B: HLA-DRB1*11:01L HLA-DPA1*01:02-B1*04:01L HLA-DRB1*08:02L
  source 1..15: note = Severe acute respiratory syndrome coronavirus 2
TENKYSQLDEEQPME

SEQ ID NO: 22718 - protein, 16 aa, Severe acute respiratory syndrome-related coronavirus
  REGION 1..16: note = Table B: HLA-DRB1*11:01L
  source 1..16: note = Severe acute respiratory syndrome coronavirus 2
KLFIRQEEVQELYSPI

SEQ ID NO: 22719 - protein, 16 aa, Severe acute respiratory syndrome-related coronavirus
  REGION 1..16: note = Table B: HLA-DRB1*11:01L HLA-DQA1*02:01-B1*03:03L
  source 1..16: note = Severe acute respiratory syndrome coronavirus 2
VAAFHQECSLQSCTQH

SEQ ID NO: 22720 - protein, 18 aa, Severe acute respiratory syndrome-related coronavirus
  REGION 1..18: note = Table B: HLA-DRB1*11:01L
  source 1..18: note = Severe acute respiratory syndrome coronavirus 2
LPFTINCQEPKLGSLVVR

SEQ ID NO: 22721 - protein, 16 aa, Severe acute respiratory syndrome-related coronavirus
  REGION 1..16: note = Table B: HLA-DRB1*11:01L HLA-DQA1*05:01-B1*02:01L HLA-DPA1*01:03-B1*04:02L
  source 1..16: note = Severe acute respiratory syndrome coronavirus 2
TPGSSRGTSPARMAGN

SEQ ID NO: 22722 - protein, 14 aa, Severe acute respiratory syndrome-related coronavirus
  REGION 1..14: note = Table B: HLA-DRB1*11:01L
  source 1..14: note = Severe acute respiratory syndrome coronavirus 2
GTDYKHWPQIAQFA

SEQ ID NO: 22723 - protein, 13 aa, Severe acute respiratory syndrome-related coronavirus
  REGION 1..13: note = Table B: HLA-DRB1*11:01L HLA-DPA1*01:03-B1*04:02L
  source 1..13: note = Severe acute respiratory syndrome coronavirus 2
YTGAIKLDDKDPN

SEQ ID NO: 22724 - protein, 15 aa, Severe acute respiratory syndrome-related coronavirus
  REGION 1..15: note = Table B: HLA-DRB5*01:01L HLA-DRB1*09:01L HLA-DPA1*01:03-B1*04:02L HLA-DRB1*07:01L
  source 1..15: note = Severe acute respiratory syndrome coronavirus 2
TQYEYGTEDDYQGKP

SEQ ID NO: 22725 - protein, 11 aa, Severe acute respiratory syndrome-related coronavirus
  REGION 1..11: note = Table B: HLA-DRB5*01:01L HLA-DRB1*15:01L
  source 1..11: note = Severe acute respiratory syndrome coronavirus 2
TTYPGQGLNGY

SEQ ID NO: 22726 - protein, 17 aa, Severe acute respiratory syndrome-related coronavirus
  REGION 1..17: note = Table B: HLA-DRB5*01:01L HLA-DRB1*13:01L HLA-DRB1*15:01L
  source 1..17: note = Severe acute respiratory syndrome coronavirus 2
DTNVLEGSVAYESLRPD

SEQ ID NO: 22727 - protein, 16 aa, Severe acute respiratory syndrome-related coronavirus
  REGION 1..16: note = Table B: HLA-DRB5*01:01L
  source 1..16: note = Severe acute respiratory syndrome coronavirus 2
DVQQWGFTGNLQSNHD

SEQ ID NO: 22728 - protein, 15 aa, Severe acute respiratory syndrome-related coronavirus
  REGION 1..15: note = Table B: HLA-DRB5*01:01L HLA-DRB4*02:01NL HLA-DRB1*08:02L
  source 1..15: note = Severe acute respiratory syndrome coronavirus 2
LRQWLPTGTLLVDSD

SEQ ID NO: 22729 - protein, 15 aa, Severe acute respiratory syndrome-related coronavirus
  REGION 1..15: note = Table B: HLA-DRB5*01:01L
  source 1..15: note = Severe acute respiratory syndrome coronavirus 2
ENQKLIANQFNSAIG

SEQ ID NO: 22730 - protein, 10 aa, Severe acute respiratory syndrome-related coronavirus
  REGION 1..10: note = Table B: HLA-DQA1*01-B1*05L
  source 1..10: note = Severe acute respiratory syndrome coronavirus 2
VPGFNEKTHV

SEQ ID NO: 22731 - protein, 10 aa, Severe acute respiratory syndrome-related coronavirus
  REGION 1..10: note = Table B: HLA-DQA1*01-B1*05L
  source 1..10: note = Severe acute respiratory syndrome coronavirus 2
LVRGFGDSVE

SEQ ID NO: 22732 - protein, 11 aa, Severe acute respiratory syndrome-related coronavirus
  REGION 1..11: note = Table B: HLA-DQA1*01-B1*05L
  source 1..11: note = Severe acute respiratory syndrome coronavirus 2
LKSFDLGDELG

SEQ ID NO: 22733 - protein, 13 aa, Severe acute respiratory syndrome-related coronavirus
  REGION 1..13: note = Table B: HLA-DQA1*01-B1*05L
  source 1..13: note = Severe acute respiratory syndrome coronavirus 2
FDLGDELGTDPYE

SEQ ID NO: 22734 - protein, 10 aa, Severe acute respiratory syndrome-related coronavirus
  REGION 1..10: note = Table B: HLA-DQA1*01-B1*05L
  source 1..10: note = Severe acute respiratory syndrome coronavirus 2
DELGTDPYED

SEQ ID NO: 22735 - protein, 10 aa, Severe acute respiratory syndrome-related coronavirus
  REGION 1..10: note = Table B: HLA-DQA1*01-B1*05L
  source 1..10: note = Severe acute respiratory syndrome coronavirus 2
GTDPYEDFQE

SEQ ID NO: 22736 - protein, 10 aa, Severe acute respiratory syndrome-related coronavirus
  REGION 1..10: note = Table B: HLA-DQA1*01-B1*05L
  source 1..10: note = Severe acute respiratory syndrome coronavirus 2
TDPYEDFQEN

SEQ ID NO: 22737 - protein, 10 aa, Severe acute respiratory syndrome-related coronavirus
  REGION 1..10: note = Table B: HLA-DQA1*01-B1*05L
  source 1..10: note = Severe acute respiratory syndrome coronavirus 2
PYEDFQENWN

SEQ ID NO: 22738 - protein, 14 aa, Severe acute respiratory syndrome-related coronavirus
  REGION 1..14: note = Table B: HLA-DQA1*01-B1*05L HLA-DPA1*03:01-B1*105:01L
  source 1..14: note = Severe acute respiratory syndrome coronavirus 2
AYTRYVDNNFCGPD

SEQ ID NO: 22739 - protein, 11 aa, Severe acute respiratory syndrome-related coronavirus
  REGION 1..11: note = Table B: HLA-DQA1*01-B1*05L
  source 1..11: note = Severe acute respiratory syndrome coronavirus 2
LSEQLDFIDTK

SEQ ID NO: 22740 - protein, 10 aa, Severe acute respiratory syndrome-related coronavirus
  REGION 1..10: note = Table B: HLA-DQA1*01-B1*05L HLA-DQA1*03:01-B1*03:02L HLA-DQA1*01:03-B1*06:01L
  source 1..10: note = Severe acute respiratory syndrome coronavirus 2
EIAWYTERSE

SEQ ID NO: 22741 - protein, 10 aa, Severe acute respiratory syndrome-related coronavirus
  REGION 1..10: note = Table B: HLA-DQA1*01-B1*05L
  source 1..10: note = Severe acute respiratory syndrome coronavirus 2
LAEYHNESGL

SEQ ID NO: 22742 - protein, 10 aa, Severe acute respiratory syndrome-related coronavirus
  REGION 1..10: note = Table B: HLA-DQA1*01-B1*05L
  source 1..10: note = Severe acute respiratory syndrome coronavirus 2
SEGLNDNLLE

SEQ ID NO: 22743 - protein, 11 aa, Severe acute respiratory syndrome-related coronavirus
  REGION 1..11: note = Table B: HLA-DQA1*01-B1*05L HLA-DQA1*03:01-B1*03:02L
  source 1..11: note = Severe acute respiratory syndrome coronavirus 2
VGDFKLNEEIA

SEQ ID NO: 22744 - protein, 13 aa, Severe acute respiratory syndrome-related coronavirus
  REGION 1..13: note = Table B: HLA-DQA1*01-B1*05L HLA-DRB1*04:08L
  source 1..13: note = Severe acute respiratory syndrome coronavirus 2
VVRSIFSRTLETA

SEQ ID NO: 22745 - protein, 10 aa, Severe acute respiratory syndrome-related coronavirus
  REGION 1..10: note = Table B: HLA-DQA1*01-B1*05L
  source 1..10: note = Severe acute respiratory syndrome coronavirus 2
ISQYSLRLID

SEQ ID NO: 22746 - protein, 12 aa, Severe acute respiratory syndrome-related coronavirus
  REGION 1..12: note = Table B: HLA-DQA1*01-B1*05L
  source 1..12: note = Severe acute respiratory syndrome coronavirus 2
IDAMMFTSDLAT

SEQ ID NO: 22747 - protein, 12 aa, Severe acute respiratory syndrome-related coronavirus
  REGION 1..12: note = Table B: HLA-DQA1*01-B1*05L
  source 1..12: note = Severe acute respiratory syndrome coronavirus 2
DAMMFTSDLATN

SEQ ID NO: 22748 - protein, 11 aa, Severe acute respiratory syndrome-related coronavirus
  REGION 1..11: note = Table B: HLA-DQA1*01-B1*05L HLA-DQA1*05:01-B1*02:01L
  source 1..11: note = Severe acute respiratory syndrome coronavirus 2
KPVLDWLEEKF

SEQ ID NO: 22749 - protein, 10 aa, Severe acute respiratory syndrome-related coronavirus
  REGION 1..10: note = Table B: HLA-DQA1*01-B1*05L
  source 1..10: note = Severe acute respiratory syndrome coronavirus 2
VLDWLEEKFK

SEQ ID NO: 22750 - protein, 11 aa, Severe acute respiratory syndrome-related coronavirus
  REGION 1..11: note = Table B: HLA-DQA1*01-B1*05L HLA-DQA1*01:03-B1*06:01L
  source 1..11: note = Severe acute respiratory syndrome coronavirus 2
EGVEFLRDGWE

SEQ ID NO: 22751 - protein, 12 aa, Severe acute respiratory syndrome-related coronavirus
  REGION 1..12: note = Table B: HLA-DQA1*01-B1*05L HLA-DQA1*03:01-B1*03:02L
  source 1..12: note = Severe acute respiratory syndrome coronavirus 2
APKEIIFLEGET

SEQ ID NO: 22752 - protein, 11 aa, Severe acute respiratory syndrome-related coronavirus
  REGION 1..11: note = Table B: HLA-DQA1*01-B1*05L HLA-DQA1*05:01-B1*02:01L
  source 1..11: note = Severe acute respiratory syndrome coronavirus 2
LEGETLPTEVL

SEQ ID NO: 22753 - protein, 12 aa, Severe acute respiratory syndrome-related coronavirus
  REGION 1..12: note = Table B: HLA-DQA1*01-B1*05L HLA-DQA1*05:01-B1*02:01L HLA-DQA1*03:01-B1*03:02L
  source 1..12: note = Severe acute respiratory syndrome coronavirus 2
TLPTEVLTEEVV

SEQ ID NO: 22754 - protein, 12 aa, Severe acute respiratory syndrome-related coronavirus
  REGION 1..12: note = Table B: HLA-DQA1*01-B1*05L HLA-DQA1*05:01-B1*02:01L
  source 1..12: note = Severe acute respiratory syndrome coronavirus 2
LPTEVLTEEVVL

SEQ ID NO: 22755 - protein, 11 aa, Severe acute respiratory syndrome-related coronavirus
  REGION 1..11: note = Table B: HLA-DQA1*01-B1*05L HLA-DQA1*03:01-B1*03:02L HLA-DQA1*02:01-B1*03:03L
  source 1..11: note = Severe acute respiratory syndrome coronavirus 2
APTKVTFGDDT

SEQ ID NO: 22756 - protein, 12 aa, Severe acute respiratory syndrome-related coronavirus
  REGION 1..12: note = Table B: HLA-DQA1*01-B1*05L
  source 1..12: note = Severe acute respiratory syndrome coronavirus 2
PTKVTFGDDTVI

SEQ ID NO: 22757 - protein, 10 aa, Severe acute respiratory syndrome-related coronavirus
  REGION 1..10: note = Table B: HLA-DQA1*01-B1*05L HLA-DQA1*05:01-B1*02:01L
  source 1..10: note = Severe acute respiratory syndrome coronavirus 2
VTFGDDTVIE

SEQ ID NO: 22758 - protein, 12 aa, Severe acute respiratory syndrome-related coronavirus
  REGION 1..12: note = Table B: HLA-DQA1*01-B1*05L
  source 1..12: note = Severe acute respiratory syndrome coronavirus 2
TFGDDTVIEVQG

SEQ ID NO: 22759 - protein, 14 aa, Severe acute respiratory syndrome-related coronavirus
  REGION 1..14: note = Table B: HLA-DQA1*01-B1*05L HLA-DQA1*01:03-B1*06:01L
  source 1..14: note = Severe acute respiratory syndrome coronavirus 2
GTEVNEFACVVADA

SEQ ID NO: 22760 - protein, 13 aa, Severe acute respiratory syndrome-related coronavirus
  REGION 1..13: note = Table B: HLA-DQA1*01-B1*05L
  source 1..13: note = Severe acute respiratory syndrome coronavirus 2
SELLTPLGIDLDE

SEQ ID NO: 22761 - protein, 11 aa, Severe acute respiratory syndrome-related coronavirus
  REGION 1..11: note = Table B: HLA-DQA1*01-B1*05L
  source 1..11: note = Severe acute respiratory syndrome coronavirus 2
TPLGIDLDEWS

SEQ ID NO: 22762 - protein, 15 aa, Severe acute respiratory syndrome-related coronavirus
  REGION 1..15: note = Table B: HLA-DQA1*01-B1*05L HLA-DQA1*05:01-B1*02:01L HLA-DPA1*01:03-B1*04:02L HLA-DPA1*01:02-B1*04:01L HLA-DQA1*01:03-B1*06:01L
  source 1..15: note = Severe acute respiratory syndrome coronavirus 2
DEWSMATYYLFDESG

SEQ ID NO: 22763 - protein, 12 aa, Severe acute respiratory syndrome-related coronavirus
  REGION 1..12: note = Table B: HLA-DQA1*01-B1*05L
  source 1..12: note = Severe acute respiratory syndrome coronavirus 2
MATYYLFDESGE

SEQ ID NO: 22764 - protein, 13 aa, Severe acute respiratory syndrome-related coronavirus
  REGION 1..13: note = Table B: HLA-DQA1*01-B1*05L
  source 1..13: note = Severe acute respiratory syndrome coronavirus 2
SHMYCSFYPPDED

SEQ ID NO: 22765 - protein, 13 aa, Severe acute respiratory syndrome-related coronavirus
  REGION 1..13: note = Table B: HLA-DQA1*01-B1*05L
  source 1..13: note = Severe acute respiratory syndrome coronavirus 2
HMYCSFYPPDEDE

SEQ ID NO: 22766 - protein, 10 aa, Severe acute respiratory syndrome-related coronavirus
  REGION 1..10: note = Table B: HLA-DQA1*01-B1*05L
  source 1..10: note = Severe acute respiratory syndrome coronavirus 2
SFYPPDEDEE

SEQ ID NO: 22767 - protein, 19 aa, Severe acute respiratory syndrome-related coronavirus
  REGION 1..19: note = Table B: HLA-DQA1*01-B1*05L
  source 1..19: note = Severe acute respiratory syndrome coronavirus 2
YPPDEDEEEGDCEEEEFEP

SEQ ID NO: 22768 - protein, 14 aa, Severe acute respiratory syndrome-related coronavirus
  REGION 1..14: note = Table B: HLA-DQA1*01-B1*05L
  source 1..14: note = Severe acute respiratory syndrome coronavirus 2
EEGDCEEEEFEPST

SEQ ID NO: 22769 - protein, 13 aa, Severe acute respiratory syndrome-related coronavirus
  REGION 1..13: note = Table B: HLA-DQA1*01-B1*05L
  source 1..13: note = Severe acute respiratory syndrome coronavirus 2
GDCEEEEFEPSTQ

SEQ ID NO: 22770 - protein, 13 aa, Severe acute respiratory syndrome-related coronavirus
  REGION 1..13: note = Table B: HLA-DQA1*01-B1*05L
  source 1..13: note = Severe acute respiratory syndrome coronavirus 2
PSTQYEYGTEDDY

SEQ ID NO: 22771 - protein, 10 aa, Severe acute respiratory syndrome-related coronavirus
  REGION 1..10: note = Table B: HLA-DQA1*01-B1*05L
  source 1..10: note = Severe acute respiratory syndrome coronavirus 2
YEYGTEDDYQ

SEQ ID NO: 22772 - protein, 11 aa, Severe acute respiratory syndrome-related coronavirus
  REGION 1..11: note = Table B: HLA-DQA1*01-B1*05L
  source 1..11: note = Severe acute respiratory syndrome coronavirus 2
EEQEEDWLDDD

SEQ ID NO: 22773 - protein, 11 aa, Severe acute respiratory syndrome-related coronavirus
  REGION 1..11: note = Table B: HLA-DQA1*01-B1*05L
  source 1..11: note = Severe acute respiratory syndrome coronavirus 2
EQEEDWLDDDS

SEQ ID NO: 22774 - protein, 10 aa, Severe acute respiratory syndrome-related coronavirus
  REGION 1..10: note = Table B: HLA-DQA1*01-B1*05L
  source 1..10: note = Severe acute respiratory syndrome coronavirus 2
EEDWLDDDSQ

SEQ ID NO: 22775 - protein, 10 aa, Severe acute respiratory syndrome-related coronavirus
  REGION 1..10: note = Table B: HLA-DQA1*01-B1*05L
  source 1..10: note = Severe acute respiratory syndrome coronavirus 2
EDWLDDDSQQ

SEQ ID NO: 22776 - protein, 12 aa, Severe acute respiratory syndrome-related coronavirus
  REGION 1..12: note = Table B: HLA-DQA1*01-B1*05L
  source 1..12: note = Severe acute respiratory syndrome coronavirus 2
DWLDDDSQQTVG

SEQ ID NO: 22777 - protein, 11 aa, Severe acute respiratory syndrome-related coronavirus
  REGION 1..11: note = Table B: HLA-DQA1*01-B1*05L
  source 1..11: note = Severe acute respiratory syndrome coronavirus 2
DNVYIKNADIV

SEQ ID NO: 22778 - protein, 11 aa, Severe acute respiratory syndrome-related coronavirus
  REGION 1..11: note = Table B: HLA-DQA1*01-B1*05L HLA-DQA1*03:01-B1*03:02L HLA-DRB1*16:01L HLA-DQA1*01:03-B1*06:01L HLA-DQA1*02:01-B1*03:03L
  source 1..11: note = Severe acute respiratory syndrome coronavirus 2
YIKNADIVEEA

SEQ ID NO: 22779 - protein, 11 aa, Severe acute respiratory syndrome-related coronavirus
  REGION 1..11: note = Table B: HLA-DQA1*01-B1*05L
  source 1..11: note = Severe acute respiratory syndrome coronavirus 2
AMQVESDDYIA

SEQ ID NO: 22780 - protein, 12 aa, Severe acute respiratory syndrome-related coronavirus
  REGION 1..12: note = Table B: HLA-DQA1*01-B1*05L HLA-DQA1*05:01-B1*02:01L
  source 1..12: note = Severe acute respiratory syndrome coronavirus 2
MQVESDDYIATN

SEQ ID NO: 22781 - protein, 11 aa, Severe acute respiratory syndrome-related coronavirus
  REGION 1..11: note = Table B: HLA-DQA1*01-B1*05L HLA-DQA1*01:03-B1*06:01L
  source 1..11: note = Severe acute respiratory syndrome coronavirus 2
LVSSFLEMKSE

SEQ ID NO: 22782 - protein, 12 aa, Severe acute respiratory syndrome-related coronavirus
  REGION 1..12: note = Table B: HLA-DQA1*01-B1*05L HLA-DRB1*15:03L
  source 1..12: note = Severe acute respiratory syndrome coronavirus 2
ENLLLYIDINGN

SEQ ID NO: 22783 - protein, 13 aa, Severe acute respiratory syndrome-related coronavirus
  REGION 1..13: note = Table B: HLA-DQA1*01-B1*05L
  source 1..13: note = Severe acute respiratory syndrome coronavirus 2
SATLVSDIDITFL

SEQ ID NO: 22784 - protein, 11 aa, Severe acute respiratory syndrome-related coronavirus
  REGION 1..11: note = Table B: HLA-DQA1*01-B1*05L HLA-DQA1*03:01-B1*03:02L
  source 1..11: note = Severe acute respiratory syndrome coronavirus 2
DAPYIVGDVVQ

SEQ ID NO: 22785 - protein, 11 aa, Severe acute respiratory syndrome-related coronavirus
  REGION 1..11: note = Table B: HLA-DQA1*01-B1*05L HLA-DQA1*03:01-B1*03:02L
  source 1..11: note = Severe acute respiratory syndrome coronavirus 2
PYIVGDVVQEG

SEQ ID NO: 22786 - protein, 13 aa, Severe acute respiratory syndrome-related coronavirus
  REGION 1..13: note = Table B: HLA-DQA1*01-B1*05L
  source 1..13: note = Severe acute respiratory syndrome coronavirus 2
VPATVSVSSPDAV

SEQ ID NO: 22787 - protein, 10 aa, Severe acute respiratory syndrome-related coronavirus
  REGION 1..10: note = Table B: HLA-DQA1*01-B1*05L
  source 1..10: note = Severe acute respiratory syndrome coronavirus 2
AVTAYNGYLT

SEQ ID NO: 22788 - protein, 10 aa, Severe acute respiratory syndrome-related coronavirus
  REGION 1..10: note = Table B: HLA-DQA1*01-B1*05L HLA-DQA1*05:05-B1*03:19L HLA-DQA1*05:05-B1*03:116L HLA-DPA1*02:01-B1*13:01L
  source 1..10: note = Severe acute respiratory syndrome coronavirus 2
TPEEHFIETI

SEQ ID NO: 22789 - protein, 10 aa, Severe acute respiratory syndrome-related coronavirus
  REGION 1..10: note = Table B: HLA-DQA1*01-B1*05L
  source 1..10: note = Severe acute respiratory syndrome coronavirus 2
AGSYKDWSYS

SEQ ID NO: 22790 - protein, 10 aa, Severe acute respiratory syndrome-related coronavirus
  REGION 1..10: note = Table B: HLA-DQA1*01-B1*05L
  source 1..10: note = Severe acute respiratory syndrome coronavirus 2
GSYKDWSYSG

SEQ ID NO: 22791 - protein, 11 aa, Severe acute respiratory syndrome-related coronavirus
  REGION 1..11: note = Table B: HLA-DQA1*01-B1*05L HLA-DQA1*03:01-B1*03:02L
  source 1..11: note = Severe acute respiratory syndrome coronavirus 2
KDWSYSGQSTQ

SEQ ID NO: 22792 - protein, 11 aa, Severe acute respiratory syndrome-related coronavirus
  REGION 1..11: note = Table B: HLA-DQA1*01-B1*05L
  source 1..11: note = Severe acute respiratory syndrome coronavirus 2
NPTTFHLDGEV

SEQ ID NO: 22793 - protein, 11 aa, Severe acute respiratory syndrome-related coronavirus
  REGION 1..11: note = Table B: HLA-DQA1*01-B1*05L HLA-DQA1*03:01-B1*03:02L
  source 1..11: note = Severe acute respiratory syndrome coronavirus 2
GPTYLDGADVT

SEQ ID NO: 22794 - protein, 10 aa, Severe acute respiratory syndrome-related coronavirus
  REGION 1..10: note = Table B: HLA-DQA1*01-B1*05L
  source 1..10: note = Severe acute respiratory syndrome coronavirus 2
KTFYVLPNDD

SEQ ID NO: 22795 - protein, 10 aa, Severe acute respiratory syndrome-related coronavirus
  REGION 1..10: note = Table B: HLA-DQA1*01-B1*05L HLA-DQA1*05:01-B1*02:01L HLA-DQA1*03:01-B1*03:02L
  source 1..10: note = Severe acute respiratory syndrome coronavirus 2
DDTLRVEAFE

SEQ ID NO: 22796 - protein, 12 aa, Severe acute respiratory syndrome-related coronavirus
  REGION 1..12: note = Table B: HLA-DQA1*01-B1*05L HLA-DPA1*03:01-B1*105:01L HLA-DPA1*01:02-B1*04:01L
  source 1..12: note = Severe acute respiratory syndrome coronavirus 2
VEAFEYYHTTDP

SEQ ID NO: 22797 - protein, 10 aa, Severe acute respiratory syndrome-related coronavirus
  REGION 1..10: note = Table B: HLA-DQA1*01-B1*05L
  source 1..10: note = Severe acute respiratory syndrome coronavirus 2
FEYYHTTDPS

SEQ ID NO: 22798 - protein, 11 aa, Severe acute respiratory syndrome-related coronavirus
  REGION 1..11: note = Table B: HLA-DQA1*01-B1*05L HLA-DQA1*02:01-B1*03:03L HLA-DRB1*15:03L
  source 1..11: note = Severe acute respiratory syndrome coronavirus 2
TSIKWADNNCY

SEQ ID NO: 22799 - protein, 11 aa, Severe acute respiratory syndrome-related coronavirus
  REGION 1..11: note = Table B: HLA-DQA1*01-B1*05L
  source 1..11: note = Severe acute respiratory syndrome coronavirus 2
MSYLFQHANLD

SEQ ID NO: 22800 - protein, 11 aa, Severe acute respiratory syndrome-related coronavirus
  REGION 1..11: note = Table B: HLA-DQA1*01-B1*05L HLA-DQA1*03:01-B1*03:02L
  source 1..11: note = Severe acute respiratory syndrome coronavirus 2
ATKYLVQQESP

SEQ ID NO: 22801 - protein, 14 aa, Severe acute respiratory syndrome-related coronavirus
  REGION 1..14: note = Table B: HLA-DQA1*01-B1*05L HLA-DPA1*02:01-B1*13:01L
  source 1..14: note = Severe acute respiratory syndrome coronavirus 2
ITSKETLYCIDGAL

SEQ ID NO: 22802 - protein, 13 aa, Severe acute respiratory syndrome-related coronavirus
  REGION 1..13: note = Table B: HLA-DQA1*01-B1*05L HLA-DRB1*15:03L
  source 1..13: note = Severe acute respiratory syndrome coronavirus 2
SKETLYCIDGALL

SEQ ID NO: 22803 - protein, 10 aa, Severe acute respiratory syndrome-related coronavirus
  REGION 1..10: note = Table B: HLA-DQA1*01-B1*05L HLA-DPA1*03:01-B1*105:01L HLA-DQA1*01:03-B1*06:01L
  source 1..10: note = Severe acute respiratory syndrome coronavirus 2
PITDVFYKEN

SEQ ID NO: 22804 - protein, 12 aa, Severe acute respiratory syndrome-related coronavirus
  REGION 1..12: note = Table B: HLA-DQA1*01-B1*05L
  source 1..12: note = Severe acute respiratory syndrome coronavirus 2
IKPVTYKLDGVV

SEQ ID NO: 22805 - protein, 10 aa, Severe acute respiratory syndrome-related coronavirus
  REGION 1..10: note = Table B: HLA-DQA1*01-B1*05L
  source 1..10: note = Severe acute respiratory syndrome coronavirus 2
NSYFTEQPID

SEQ ID NO: 22806 - protein, 10 aa, Severe acute respiratory syndrome-related coronavirus
  REGION 1..10: note = Table B: HLA-DQA1*01-B1*05L HLA-DQA1*03:01-B1*03:02L
  source 1..10: note = Severe acute respiratory syndrome coronavirus 2
DNIKFADDLN

SEQ ID NO: 22807 - protein, 10 aa, Severe acute respiratory syndrome-related coronavirus
  REGION 1..10: note = Table B: HLA-DQA1*01-B1*05L
  source 1..10: note = Severe acute respiratory syndrome coronavirus 2
KVTFFPDLNG

SEQ ID NO: 22808 - protein, 10 aa, Severe acute respiratory syndrome-related coronavirus
  REGION 1..10: note = Table B: HLA-DQA1*01-B1*05L
  source 1..10: note = Severe acute respiratory syndrome coronavirus 2
VTFFPDLNGD

SEQ ID NO: 22809 - protein, 11 aa, Severe acute respiratory syndrome-related coronavirus
  REGION 1..11: note = Table B: HLA-DQA1*01-B1*05L HLA-DQA1*02:01-B1*03:03L
  source 1..11: note = Severe acute respiratory syndrome coronavirus 2
KSEDAQGMDNL

SEQ ID NO: 22810 - protein, 11 aa, Severe acute respiratory syndrome-related coronavirus
  REGION 1..11: note = Table B: HLA-DQA1*01-B1*05L HLA-DQA1*05:01-B1*02:01L
  source 1..11: note = Severe acute respiratory syndrome coronavirus 2
EDLKPVSEEVV

SEQ ID NO: 22811 - protein, 10 aa, Severe acute respiratory syndrome-related coronavirus
  REGION 1..10: note = Table B: HLA-DQA1*01-B1*05L HLA-DQA1*03:01-B1*03:02L
  source 1..10: note = Severe acute respiratory syndrome coronavirus 2
EEVVENPTIQ

SEQ ID NO: 22812 - protein, 11 aa, Severe acute respiratory syndrome-related coronavirus
  REGION 1..11: note = Table B: HLA-DQA1*01-B1*05L HLA-DQA1*05:01-B1*02:01L HLA-DQA1*03:01-B1*03:02L HLA-DQA1*01:03-B1*06:01L HLA-DQA1*02:01-B1*03:03L
  source 1..11: note = Severe acute respiratory syndrome coronavirus 2
VKTTEVVGDII

SEQ ID NO: 22813 - protein, 11 aa, Severe acute respiratory syndrome-related coronavirus
  REGION 1..11: note = Table B: HLA-DQA1*01-B1*05L
  source 1..11: note = Severe acute respiratory syndrome coronavirus 2
EEVGHTDLMAA

SEQ ID NO: 22814 - protein, 10 aa, Severe acute respiratory syndrome-related coronavirus
  REGION 1..10: note = Table B: HLA-DQA1*01-B1*05L
  source 1..10: note = Severe acute respiratory syndrome coronavirus 2
LMAAYVDNSS

SEQ ID NO: 22815 - protein, 11 aa, Severe acute respiratory syndrome-related coronavirus
  REGION 1..11: note = Table B: HLA-DQA1*01-B1*05L
  source 1..11: note = Severe acute respiratory syndrome coronavirus 2
REGYLNSTNVT

SEQ ID NO: 22816 - protein, 10 aa, Severe acute respiratory syndrome-related coronavirus
  REGION 1..10: note = Table B: HLA-DQA1*01-B1*05L HLA-DQA1*05:01-B1*02:01L HLA-DQA1*03:01-B1*03:02L HLA-DQA1*01:03-B1*06:01L
  source 1..10: note = Severe acute respiratory syndrome coronavirus 2
DTYPSLETIQ

SEQ ID NO: 22817 - protein, 13 aa, Severe acute respiratory syndrome-related coronavirus
  REGION 1..13: note = Table B: HLA-DQA1*01-B1*05L HLA-DRB1*09:01L HLA-DPA1*01:03-B1*04:02L HLA-DPA1*02:01-B1*13:01L HLA-DPA1*01:03-B1*104:01L HLA-DPA1*01:02-B1*04:01L HLA-DRB1*10:01L HLA-DRB1*04:08L
  source 1..13: note = Severe acute respiratory syndrome coronavirus 2
IINLVQMAPISAM

SEQ ID NO: 22818 - protein, 11 aa, Severe acute respiratory syndrome-related coronavirus
  REGION 1..11: note = Table B: HLA-DQA1*01-B1*05L
  source 1..11: note = Severe acute respiratory syndrome coronavirus 2
AGSTFISDEVA

SEQ ID NO: 22819 - protein, 13 aa, Severe acute respiratory syndrome-related coronavirus
  REGION 1..13: note = Table B: HLA-DQA1*01-B1*05L HLA-DQA1*05:01-B1*02:01L
  source 1..13: note = Severe acute respiratory syndrome coronavirus 2
NPTDQSSYIVDSV

SEQ ID NO: 22820 - protein, 10 aa, Severe acute respiratory syndrome-related coronavirus
  REGION 1..10: note = Table B: HLA-DQA1*01-B1*05L
  source 1..10: note = Severe acute respiratory syndrome coronavirus 2
IHLYFDKAGQ

SEQ ID NO: 22821 - protein, 10 aa, Severe acute respiratory syndrome-related coronavirus
  REGION 1..10: note = Table B: HLA-DQA1*01-B1*05L
  source 1..10: note = Severe acute respiratory syndrome coronavirus 2
LSHFVNLDNL

SEQ ID NO: 22822 - protein, 13 aa, Severe acute respiratory syndrome-related coronavirus
  REGION 1..13: note = Table B: HLA-DQA1*01-B1*05L
  source 1..13: note = Severe acute respiratory syndrome coronavirus 2
SAKSASVYYSQLM

SEQ ID NO: 22823 - protein, 16 aa, Severe acute respiratory syndrome-related coronavirus
  REGION 1..16: note = Table B: HLA-DQA1*01-B1*05L
  source 1..16: note = Severe acute respiratory syndrome coronavirus 2
AKSASVYYSQLMCQPI

SEQ ID NO: 22824 - protein, 11 aa, Severe acute respiratory syndrome-related coronavirus
  REGION 1..11: note = Table B: HLA-DQA1*01-B1*05L HLA-DQA1*05:01-B1*02:01L HLA-DRB1*12:01L HLA-DQA1*03:01-B1*03:02L HLA-DQA1*02:01-B1*03:03L
  source 1..11: note = Severe acute respiratory syndrome coronavirus 2
KTLVATAEAEL

SEQ ID NO: 22825 - protein, 10 aa, Severe acute respiratory syndrome-related coronavirus
  REGION 1..10: note = Table B: HLA-DQA1*01-B1*05L HLA-DQA1*03:01-B1*03:02L
  source 1..10: note = Severe acute respiratory syndrome coronavirus 2
AKNVSLDNVL

SEQ ID NO: 22826 - protein, 13 aa, Severe acute respiratory syndrome-related coronavirus
  REGION 1..13: note = Table B: HLA-DQA1*01-B1*05L HLA-DPA1*02:01-B1*13:01L HLA-DPA1*01:03-B1*104:01L
  source 1..13: note = Severe acute respiratory syndrome coronavirus 2
FISAARQGFVDSD

SEQ ID NO: 22827 - protein, 11 aa, Severe acute respiratory syndrome-related coronavirus
  REGION 1..11: note = Table B: HLA-DQA1*01-B1*05L
  source 1..11: note = Severe acute respiratory syndrome coronavirus 2
AARQGFVDSDV

SEQ ID NO: 22828 - protein, 10 aa, Severe acute respiratory syndrome-related coronavirus
  REGION 1..10: note = Table B: HLA-DQA1*01-B1*05M HLA-DQA1*05:01-B1*02:01L HLA-DQA1*03:01-B1*03:02L
  source 1..10: note = Severe acute respiratory syndrome coronavirus 2
RQGFVDSDVE

SEQ ID NO: 22829 - protein, 10 aa, Severe acute respiratory syndrome-related coronavirus
  REGION 1..10: note = Table B: HLA-DQA1*01-B1*05L
  source 1..10: note = Severe acute respiratory syndrome coronavirus 2
QGFVDSDVET

SEQ ID NO: 22830 - protein, 10 aa, Severe acute respiratory syndrome-related coronavirus
  REGION 1..10: note = Table B: HLA-DQA1*01-B1*05L
  source 1..10: note = Severe acute respiratory syndrome coronavirus 2
LSHQSDIEVT

SEQ ID NO: 22831 - protein, 11 aa, Severe acute respiratory syndrome-related coronavirus
  REGION 1..11: note = Table B: HLA-DQA1*01-B1*05L HLA-DQA1*03:01-B1*03:02L HLA-DPA1*01:02-B1*04:01L HLA-DQA1*01:03-B1*06:01L HLA-DQA1*02:01-B1*03:03L
  source 1..11: note = Severe acute respiratory syndrome coronavirus 2
NNYMLTYNKVE

SEQ ID NO: 22832 - protein, 10 aa, Severe acute respiratory syndrome-related coronavirus
  REGION 1..10: note = Table B: HLA-DQA1*01-B1*05L
  source 1..10: note = Severe acute respiratory syndrome coronavirus 2
VKDFMSLSEQ

SEQ ID NO: 22833 - protein, 13 aa, Severe acute respiratory syndrome-related coronavirus
  REGION 1..13: note = Table B: HLA-DQA1*01-B1*05L
  source 1..13: note = Severe acute respiratory syndrome coronavirus 2
VMSKHTDFSSEII

SEQ ID NO: 22834 - protein, 12 aa, Severe acute respiratory syndrome-related coronavirus
  REGION 1..12: note = Table B: HLA-DQA1*01-B1*05L
  source 1..12: note = Severe acute respiratory syndrome coronavirus 2
ANKHADFDTWFS

SEQ ID NO: 22835 - protein, 12 aa, Severe acute respiratory syndrome-related coronavirus
  REGION 1..12: note = Table B: HLA-DQA1*01-B1*05L
  source 1..12: note = Severe acute respiratory syndrome coronavirus 2
NKHADFDTWFSQ

SEQ ID NO: 22836 - protein, 10 aa, Severe acute respiratory syndrome-related coronavirus
  REGION 1..10: note = Table B: HLA-DQA1*01-B1*05L
  source 1..10: note = Severe acute respiratory syndrome coronavirus 2
DFDTWFSQRG

SEQ ID NO: 22837 - protein, 13 aa, Severe acute respiratory syndrome-related coronavirus
  REGION 1..13: note = Table B: HLA-DQA1*01-B1*05L
  source 1..13: note = Severe acute respiratory syndrome coronavirus 2
ITREVGFVVPGLP

SEQ ID NO: 22838 - protein, 11 aa, Severe acute respiratory syndrome-related coronavirus
  REGION 1..11: note = Table B: HLA-DQA1*01-B1*05L HLA-DQA1*03:01-B1*03:02L
  source 1..11: note = Severe acute respiratory syndrome coronavirus 2
EVGFVVPGLPG

SEQ ID NO: 22839 - protein, 11 aa, Severe acute respiratory syndrome-related coronavirus
  REGION 1..11: note = Table B: HLA-DQA1*01-B1*05L
  source 1..11: note = Severe acute respiratory syndrome coronavirus 2
TPSKLIEYTDF

SEQ ID NO: 22840 - protein, 10 aa, Severe acute respiratory syndrome-related coronavirus
  REGION 1..10: note = Table B: HLA-DQA1*01-B1*05L
  source 1..10: note = Severe acute respiratory syndrome coronavirus 2
KLIEYTDFAT

SEQ ID NO: 22841 - protein, 10 aa, Severe acute respiratory syndrome-related coronavirus
  REGION 1..10: note = Table B: HLA-DQA1*01-B1*05L
  source 1..10: note = Severe acute respiratory syndrome coronavirus 2
LIEYTDFATS

SEQ ID NO: 22842 - protein, 12 aa, Severe acute respiratory syndrome-related coronavirus
  REGION 1..12: note = Table B: HLA-DQA1*01-B1*05L
  source 1..12: note = Severe acute respiratory syndrome coronavirus 2
KPVPYCYDTNVL

SEQ ID NO: 22843 - protein, 15 aa, Severe acute respiratory syndrome-related coronavirus
  REGION 1..15: note = Table B: HLA-DQA1*01-B1*05L
  source 1..15: note = Severe acute respiratory syndrome coronavirus 2
PVPYCYDTNVLEGSV

SEQ ID NO: 22844 - protein, 12 aa, Severe acute respiratory syndrome-related coronavirus
  REGION 1..12: note = Table B: HLA-DQA1*01-B1*05L
  source 1..12: note = Severe acute respiratory syndrome coronavirus 2
IQFPNTYLEGSV

SEQ ID NO: 22845 - protein, 11 aa, Severe acute respiratory syndrome-related coronavirus
  REGION 1..11: note = Table B: HLA-DQA1*01-B1*05L HLA-DQA1*01:03-B1*06:01L
  source 1..11: note = Severe acute respiratory syndrome coronavirus 2
VVTTFDSEYCR

SEQ ID NO: 22846 - protein, 11 aa, Severe acute respiratory syndrome-related coronavirus
  REGION 1..11: note = Table B: HLA-DQA1*01-B1*05L HLA-DPA1*01:02-B1*04:01L
  source 1..11: note = Severe acute respiratory syndrome coronavirus 2
LNNDYYRSLPG

SEQ ID NO: 22847 - protein, 10 aa, Severe acute respiratory syndrome-related coronavirus
  REGION 1..10: note = Table B: HLA-DQA1*01-B1*05L
  source 1..10: note = Severe acute respiratory syndrome coronavirus 2
FYWFFSNYLK

SEQ ID NO: 22848 - protein, 11 aa, Severe acute respiratory syndrome-related coronavirus
  REGION 1..11: note = Table B: HLA-DQA1*01-B1*05L
  source 1..11: note = Severe acute respiratory syndrome coronavirus 2
NKYKYFSGAMD

SEQ ID NO: 22849 - protein, 10 aa, Severe acute respiratory syndrome-related coronavirus
  REGION 1..10: note = Table B: HLA-DQA1*01-B1*05L
  source 1..10: note = Severe acute respiratory syndrome coronavirus 2
YKYFSGAMDT

SEQ ID NO: 22850 - protein, 11 aa, Severe acute respiratory syndrome-related coronavirus
  REGION 1..11: note = Table B: HLA-DQA1*01-B1*05L HLA-DQA1*05:01-B1*02:01L HLA-DQA1*03:01-B1*03:02L
  source 1..11: note = Severe acute respiratory syndrome coronavirus 2
NDFSNSGSDVL

SEQ ID NO: 22851 - protein, 11 aa, Severe acute respiratory syndrome-related coronavirus
  REGION 1..11: note = Table B: HLA-DQA1*01-B1*05L
  source 1..11: note = Severe acute respiratory syndrome coronavirus 2
TTLNGLWLDDV

SEQ ID NO: 22852 - protein, 10 aa, Severe acute respiratory syndrome-related coronavirus
  REGION 1..10: note = Table B: HLA-DQA1*01-B1*05L
  source 1..10: note = Severe acute respiratory syndrome coronavirus 2
LNGLWLDDVV

SEQ ID NO: 22853 - protein, 10 aa, Severe acute respiratory syndrome-related coronavirus
  REGION 1..10: note = Table B: HLA-DQA1*01-B1*05L HLA-DQA1*05:05-B1*03:19L HLA-DQA1*05:01-B1*02:01L
  source 1..10: note = Severe acute respiratory syndrome coronavirus 2
NGLWLDDVVY

SEQ ID NO: 22854 - protein, 11 aa, Severe acute respiratory syndrome-related coronavirus
  REGION 1..11: note = Table B: HLA-DQA1*01-B1*05L
  source 1..11: note = Severe acute respiratory syndrome coronavirus 2
EDMLNPNYEDL

SEQ ID NO: 22855 - protein, 10 aa, Severe acute respiratory syndrome-related coronavirus
  REGION 1..10: note = Table B: HLA-DQA1*01-B1*05L HLA-DQA1*05:01-B1*02:01L HLA-DQA1*03:01-B1*03:02L
  source 1..10: note = Severe acute respiratory syndrome coronavirus 2
NPNYEDLLIR

SEQ ID NO: 22856 - protein, 12 aa, Severe acute respiratory syndrome-related coronavirus
  REGION 1..12: note = Table B: HLA-DQA1*01-B1*05L HLA-DQA1*05:05-B1*03:19L HLA-DQA1*05:01-B1*02:01L
  source 1..12: note = Severe acute respiratory syndrome coronavirus 2
GTDLEGNFYGPF

SEQ ID NO: 22857 - protein, 12 aa, Severe acute respiratory syndrome-related coronavirus
  REGION 1..12: note = Table B: HLA-DQA1*01-B1*05L
  source 1..12: note = Severe acute respiratory syndrome coronavirus 2
TDLEGNFYGPFV

SEQ ID NO: 22858 - protein, 10 aa, Severe acute respiratory syndrome-related coronavirus
  REGION 1..10: note = Table B: HLA-DQA1*01-B1*05L
  source 1..10: note = Severe acute respiratory syndrome coronavirus 2
EGNFYGPFVD

SEQ ID NO: 22859 - protein, 10 aa, Severe acute respiratory syndrome-related coronavirus
  REGION 1..10: note = Table B: HLA-DQA1*01-B1*05L HLA-DQA1*03:01-B1*03:02L
  source 1..10: note = Severe acute respiratory syndrome coronavirus 2
NFYGPFVDRQ

SEQ ID NO: 22860 - protein, 10 aa, Severe acute respiratory syndrome-related coronavirus
  REGION 1..10: note = Table B: HLA-DQA1*01-B1*05L
  source 1..10: note = Severe acute respiratory syndrome coronavirus 2
FYGPFVDRQT

SEQ ID NO: 22861 - protein, 10 aa, Severe acute respiratory syndrome-related coronavirus
  REGION 1..10: note = Table B: HLA-DQA1*01-B1*05L
  source 1..10: note = Severe acute respiratory syndrome coronavirus 2
PFVDRQTAQA

SEQ ID NO: 22862 - protein, 11 aa, Severe acute respiratory syndrome-related coronavirus
  REGION 1..11: note = Table B: HLA-DQA1*01-B1*05L
  source 1..11: note = Severe acute respiratory syndrome coronavirus 2
TTLNDFNLVAM

SEQ ID NO: 22863 - protein, 10 aa, Severe acute respiratory syndrome-related coronavirus
  REGION 1..10: note = Table B: HLA-DQA1*01-B1*05L HLA-DQA1*03:01-B1*03:02L HLA-DPA1*01:02-B1*04:01L
  source 1..10: note = Severe acute respiratory syndrome coronavirus 2
LNDFNLVAMK

SEQ ID NO: 22864 - protein, 11 aa, Severe acute respiratory syndrome-related coronavirus
  REGION 1..11: note = Table B: HLA-DQA1*01-B1*05L
  source 1..11: note = Severe acute respiratory syndrome coronavirus 2
LVAMKYNYEPL

SEQ ID NO: 22865 - protein, 11 aa, Severe acute respiratory syndrome-related coronavirus
  REGION 1..11: note = Table B: HLA-DQA1*01-B1*05L
  source 1..11: note = Severe acute respiratory syndrome coronavirus 2
VAMKYNYEPLT

SEQ ID NO: 22866 - protein, 12 aa, Severe acute respiratory syndrome-related coronavirus
  REGION 1..12: note = Table B: HLA-DQA1*01-B1*05L
  source 1..12: note = Severe acute respiratory syndrome coronavirus 2
AMKYNYEPLTQD

SEQ ID NO: 22867 - protein, 11 aa, Severe acute respiratory syndrome-related coronavirus
  REGION 1..11: note = Table B: HLA-DQA1*01-B1*05L HLA-DQA1*03:01-B1*03:02L
  source 1..11: note = Severe acute respiratory syndrome coronavirus 2
TQDHVDILGPL

SEQ ID NO: 22868 - protein, 11 aa, Severe acute respiratory syndrome-related coronavirus
  REGION 1..11: note = Table B: HLA-DQA1*01-B1*05L HLA-DPA1*03:01-B1*105:01L
  source 1..11: note = Severe acute respiratory syndrome coronavirus 2
SALLEDEFTPF

SEQ ID NO: 22869 - protein, 10 aa, Severe acute respiratory syndrome-related coronavirus
  REGION 1..10: note = Table B: HLA-DQA1*01-B1*05L HLA-DQA1*05:01-B1*02:01L
  source 1..10: note = Severe acute respiratory syndrome coronavirus 2
LLEDEFTPFD

SEQ ID NO: 22870 - protein, 11 aa, Severe acute respiratory syndrome-related coronavirus
  REGION 1..11: note = Table B: HLA-DQA1*01-B1*05L HLA-DQA1*05:01-B1*02:01L HLA-DQA1*03:01-B1*03:02L
  source 1..11: note = Severe acute respiratory syndrome coronavirus 2
LEDEFTPFDVV

SEQ ID NO: 22871 - protein, 10 aa, Severe acute respiratory syndrome-related coronavirus
  REGION 1..10: note = Table B: HLA-DQA1*01-B1*05L HLA-DQA1*01:03-B1*06:01L
  source 1..10: note = Severe acute respiratory syndrome coronavirus 2
ENAFLPFAMG

SEQ ID NO: 22872 - protein, 12 aa, Severe acute respiratory syndrome-related coronavirus
  REGION 1..12: note = Table B: HLA-DQA1*01-B1*05L
  source 1..12: note = Severe acute respiratory syndrome coronavirus 2
TVAYFNMVYMPA

SEQ ID NO: 22873 - protein, 10 aa, Severe acute respiratory syndrome-related coronavirus
  REGION 1..10: note = Table B: HLA-DQA1*01-B1*05L
  source 1..10: note = Severe acute respiratory syndrome coronavirus 2
RIMTWLDMVD

SEQ ID NO: 22874 - protein, 10 aa, Severe acute respiratory syndrome-related coronavirus
  REGION 1..10: note = Table B: HLA-DQA1*01-B1*05L
  source 1..10: note = Severe acute respiratory syndrome coronavirus 2
IMTWLDMVDT

SEQ ID NO: 22875 - protein, 10 aa, Severe acute respiratory syndrome-related coronavirus
  REGION 1..10: note = Table B: HLA-DQA1*01-B1*05L HLA-DRB1*15:03L
  source 1..10: note = Severe acute respiratory syndrome coronavirus 2
YKVYYGNALD

SEQ ID NO: 22876 - protein, 10 aa, Severe acute respiratory syndrome-related coronavirus
  REGION 1..10: note = Table B: HLA-DQA1*01-B1*05L
  source 1..10: note = Severe acute respiratory syndrome coronavirus 2
VYDYLVSTQE

SEQ ID NO: 22877 - protein, 15 aa, Severe acute respiratory syndrome-related coronavirus
  REGION 1..15: note = Table B: HLA-DQA1*01-B1*05L HLA-DRB4*01:01L HLA-DPA1*01:03-B1*104:01L
  source 1..15: note = Severe acute respiratory syndrome coronavirus 2
LSVLQQLRVESSSKL

SEQ ID NO: 22878 - protein, 12 aa, Severe acute respiratory syndrome-related coronavirus
  REGION 1..12: note = Table B: HLA-DQA1*01-B1*05L HLA-DQA1*03:01-B1*03:02L
  source 1..12: note = Severe acute respiratory syndrome coronavirus 2
AQEAYEQAVANG

SEQ ID NO: 22879 - protein, 11 aa, Severe acute respiratory syndrome-related coronavirus
  REGION 1..11: note = Table B: HLA-DQA1*01-B1*05L
  source 1..11: note = Severe acute respiratory syndrome coronavirus 2
LNVAKSEFDRD

SEQ ID NO: 22880 - protein, 10 aa, Severe acute respiratory syndrome-related coronavirus
  REGION 1..10: note = Table B: HLA-DQA1*01-B1*05L
  source 1..10: note = Severe acute respiratory syndrome coronavirus 2
KLEKMADQAM

SEQ ID NO: 22881 - protein, 17 aa, Severe acute respiratory syndrome-related coronavirus
  REGION 1..17: note = Table B: HLA-DQA1*01-B1*05L HLA-DRB1*15:01L
  source 1..17: note = Severe acute respiratory syndrome coronavirus 2
ADQAMTQMYKQARSEDK

SEQ ID NO: 22882 - protein, 11 aa, Severe acute respiratory syndrome-related coronavirus
  REGION 1..11: note = Table B: HLA-DQA1*01-B1*05L
  source 1..11: note = Severe acute respiratory syndrome coronavirus 2
TMLRKLDNDAL

SEQ ID NO: 22883 - protein, 11 aa, Severe acute respiratory syndrome-related coronavirus
  REGION 1..11: note = Table B: HLA-DQA1*01-B1*05L
  source 1..11: note = Severe acute respiratory syndrome coronavirus 2
MLRKLDNDALN

SEQ ID NO: 22884 - protein, 12 aa, Severe acute respiratory syndrome-related coronavirus
  REGION 1..12: note = Table B: HLA-DQA1*01-B1*05L
  source 1..12: note = Severe acute respiratory syndrome coronavirus 2
RKLDNDALNNII

SEQ ID NO: 22885 - protein, 11 aa, Severe acute respiratory syndrome-related coronavirus
  REGION 1..11: note = Table B: HLA-DQA1*01-B1*05L HLA-DQA1*01:03-B1*06:01L HLA-DQA1*02:01-B1*03:03L
  source 1..11: note = Severe acute respiratory syndrome coronavirus 2
AKLMVVIPDYN

SEQ ID NO: 22886 - protein, 10 aa, Severe acute respiratory syndrome-related coronavirus
  REGION 1..10: note = Table B: HLA-DQA1*01-B1*05L
  source 1..10: note = Severe acute respiratory syndrome coronavirus 2
IPDYNTYKNT

SEQ ID NO: 22887 - protein, 13 aa, Severe acute respiratory syndrome-related coronavirus
  REGION 1..13: note = Table B: HLA-DQA1*01-B1*05L HLA-DQA1*05:01-B1*02:01L HLA-DPA1*01:03-B1*04:01L HLA-DRB1*15:03L
  source 1..13: note = Severe acute respiratory syndrome coronavirus 2
TTFTYASALWEIQ

SEQ ID NO: 22888 - protein, 13 aa, Severe acute respiratory syndrome-related coronavirus
  REGION 1..13: note = Table B: HLA-DQA1*01-B1*05L
  source 1..13: note = Severe acute respiratory syndrome coronavirus 2
YASALWEIQQVVD

SEQ ID NO: 22889 - protein, 16 aa, Severe acute respiratory syndrome-related coronavirus
  REGION 1..16: note = Table B: HLA-DQA1*01-B1*05L
  source 1..16: note = Severe acute respiratory syndrome coronavirus 2
VTALRANSAVKLQNNE

SEQ ID NO: 22890 - protein, 11 aa, Severe acute respiratory syndrome-related coronavirus
  REGION 1..11: note = Table B: HLA-DQA1*01-B1*05L HLA-DRB4*01:01L
  source 1..11: note = Severe acute respiratory syndrome coronavirus 2
NELSPVALRQM

SEQ ID NO: 22891 - protein, 12 aa, Severe acute respiratory syndrome-related coronavirus
  REGION 1..12: note = Table B: HLA-DQA1*01-B1*05L HLA-DQA1*05:01-B1*02:01L
  source 1..12: note = Severe acute respiratory syndrome coronavirus 2
TTQTACTDDNAL

SEQ ID NO: 22892 - protein, 10 aa, Severe acute respiratory syndrome-related coronavirus
  REGION 1..10: note = Table B: HLA-DQA1*01-B1*05L
  source 1..10: note = Severe acute respiratory syndrome coronavirus 2
ALAYYNTTKG

SEQ ID NO: 22893 - protein, 10 aa, Severe acute respiratory syndrome-related coronavirus
  REGION 1..10: note = Table B: HLA-DQA1*01-B1*05L
  source 1..10: note = Severe acute respiratory syndrome coronavirus 2
LAYYNTTKGG

SEQ ID NO: 22894 - protein, 10 aa, Severe acute respiratory syndrome-related coronavirus
  REGION 1..10: note = Table B: HLA-DQA1*01-B1*05L HLA-DQA1*01:03-B1*06:01L
  source 1..10: note = Severe acute respiratory syndrome coronavirus 2
DAAKAYKDYL

SEQ ID NO: 22895 - protein, 10 aa, Severe acute respiratory syndrome-related coronavirus
  REGION 1..10: note = Table B: HLA-DQA1*01-B1*05L
  source 1..10: note = Severe acute respiratory syndrome coronavirus 2
AKAYKDYLAS

SEQ ID NO: 22896 - protein, 10 aa, Severe acute respiratory syndrome-related coronavirus
  REGION 1..10: note = Table B: HLA-DQA1*01-B1*05L
  source 1..10: note = Severe acute respiratory syndrome coronavirus 2
KAYKDYLASG

SEQ ID NO: 22897 - protein, 12 aa, Severe acute respiratory syndrome-related coronavirus
  REGION 1..12: note = Table B: HLA-DQA1*01-B1*05L HLA-DQA1*03:01-B1*03:02L HLA-DQA1*02:01-B1*03:03L
  source 1..12: note = Severe acute respiratory syndrome coronavirus 2
AYKDYLASGGQP

SEQ ID NO: 22898 - protein, 10 aa, Severe acute respiratory syndrome-related coronavirus
  REGION 1..10: note = Table B: HLA-DQA1*01-B1*05L
  source 1..10: note = Severe acute respiratory syndrome coronavirus 2
AFDIYNDKVA

SEQ ID NO: 22899 - protein, 11 aa, Severe acute respiratory syndrome-related coronavirus
  REGION 1..11: note = Table B: HLA-DQA1*01-B1*05L
  source 1..11: note = Severe acute respiratory syndrome coronavirus 2
QEKDEDDNLID

SEQ ID NO: 22900 - protein, 11 aa, Severe acute respiratory syndrome-related coronavirus
  REGION 1..11: note = Table B: HLA-DQA1*01-B1*05L HLA-DPA1*01:02-B1*04:01L
  source 1..11: note = Severe acute respiratory syndrome coronavirus 2
DNLIDSYFVVK

SEQ ID NO: 22901 - protein, 10 aa, Severe acute respiratory syndrome-related coronavirus
  REGION 1..10: note = Table B: HLA-DQA1*01-B1*05L HLA-DQA1*03:01-B1*03:02L HLA-DQA1*01:03-B1*06:01L HLA-DQA1*02:01-B1*03:03L
  source 1..10: note = Severe acute respiratory syndrome coronavirus 2
TFSNYQHEET

SEQ ID NO: 22902 - protein, 12 aa, Severe acute respiratory syndrome-related coronavirus
  REGION 1..12: note = Table B: HLA-DQA1*01-B1*05L
  source 1..12: note = Severe acute respiratory syndrome coronavirus 2
HDFFKFRIDGDM

SEQ ID NO: 22903 - protein, 12 aa, Severe acute respiratory syndrome-related coronavirus
  REGION 1..12: note = Table B: HLA-DQA1*01-B1*05L HLA-DRB1*16:01L HLA-DRB1*15:03L
  source 1..12: note = Severe acute respiratory syndrome coronavirus 2
YALRHFDEGNCD

SEQ ID NO: 22904 - protein, 12 aa, Severe acute respiratory syndrome-related coronavirus
  REGION 1..12: note = Table B: HLA-DQA1*01-B1*05L
  source 1..12: note = Severe acute respiratory syndrome coronavirus 2
LRHFDEGNCDTL

SEQ ID NO: 22905 - protein, 13 aa, Severe acute respiratory syndrome-related coronavirus
  REGION 1..13: note = Table B: HLA-DQA1*01-B1*05L
  source 1..13: note = Severe acute respiratory syndrome coronavirus 2
KEILVTYNCCDDD

SEQ ID NO: 22906 - protein, 12 aa, Severe acute respiratory syndrome-related coronavirus
  REGION 1..12: note = Table B: HLA-DQA1*01-B1*05L
  source 1..12: note = Severe acute respiratory syndrome coronavirus 2
VTYNCCDDDYFN

SEQ ID NO: 22907 - protein, 12 aa, Severe acute respiratory syndrome-related coronavirus
  REGION 1..12: note = Table B: HLA-DQA1*01-B1*05L
  source 1..12: note = Severe acute respiratory syndrome coronavirus 2
YFNKKDWYDFVE

SEQ ID NO: 22908 - protein, 12 aa, Severe acute respiratory syndrome-related coronavirus
  REGION 1..12: note = Table B: HLA-DQA1*01-B1*05L
  source 1..12: note = Severe acute respiratory syndrome coronavirus 2
FNKKDWYDFVEN

SEQ ID NO: 22909 - protein, 12 aa, Severe acute respiratory syndrome-related coronavirus
  REGION 1..12: note = Table B: HLA-DQA1*01-B1*05L
  source 1..12: note = Severe acute respiratory syndrome coronavirus 2
NKKDWYDFVENP

SEQ ID NO: 22910 - protein, 10 aa, Severe acute respiratory syndrome-related coronavirus
  REGION 1..10: note = Table B: HLA-DQA1*01-B1*05L
  source 1..10: note = Severe acute respiratory syndrome coronavirus 2
DWYDFVENPD

SEQ ID NO: 22911 - protein, 13 aa, Severe acute respiratory syndrome-related coronavirus
  REGION 1..13: note = Table B: HLA-DQA1*01-B1*05L HLA-DQA1*01:03-B1*06:01L
  source 1..13: note = Severe acute respiratory syndrome coronavirus 2
DNQDLNGNWYDFG

SEQ ID NO: 22912 - protein, 13 aa, Severe acute respiratory syndrome-related coronavirus
  REGION 1..13: note = Table B: HLA-DQA1*01-B1*05L
  source 1..13: note = Severe acute respiratory syndrome coronavirus 2
NQDLNGNWYDFGD

SEQ ID NO: 22913 - protein, 12 aa, Severe acute respiratory syndrome-related coronavirus
  REGION 1..12: note = Table B: HLA-DQA1*01-B1*05L
  source 1..12: note = Severe acute respiratory syndrome coronavirus 2
DLNGNWYDFGDF

SEQ ID NO: 22914 - protein, 12 aa, Severe acute respiratory syndrome-related coronavirus
  REGION 1..12: note = Table B: HLA-DQA1*01-B1*05L
  source 1..12: note = Severe acute respiratory syndrome coronavirus 2
LNGNWYDFGDFI

SEQ ID NO: 22915 - protein, 10 aa, Severe acute respiratory syndrome-related coronavirus
  REGION 1..10: note = Table B: HLA-DQA1*01-B1*05L
  source 1..10: note = Severe acute respiratory syndrome coronavirus 2
NWYDFGDFIQ

SEQ ID NO: 22916 - protein, 13 aa, Severe acute respiratory syndrome-related coronavirus
  REGION 1..13: note = Table B: HLA-DQA1*01-B1*05L HLA-DRB1*15:03L
  source 1..13: note = Severe acute respiratory syndrome coronavirus 2
VPVVDSYYSLLMP

SEQ ID NO: 22917 - protein, 17 aa, Severe acute respiratory syndrome-related coronavirus
  REGION 1..17: note = Table B: HLA-DQA1*01-B1*05L HLA-DRB4*01:01L HLA-DRB1*09:01L
  source 1..17: note = Severe acute respiratory syndrome coronavirus 2
MPILTLTRALTAESHVD

SEQ ID NO: 22918 - protein, 10 aa, Severe acute respiratory syndrome-related coronavirus
  REGION 1..10: note = Table B: HLA-DQA1*01-B1*05L
  source 1..10: note = Severe acute respiratory syndrome coronavirus 2
AESHVDTDLT

SEQ ID NO: 22919 - protein, 13 aa, Severe acute respiratory syndrome-related coronavirus
  REGION 1..13: note = Table B: HLA-DQA1*01-B1*05L
  source 1..13: note = Severe acute respiratory syndrome coronavirus 2
IKWDLLKYDFTEE

SEQ ID NO: 22920 - protein, 10 aa, Severe acute respiratory syndrome-related coronavirus
  REGION 1..10: note = Table B: HLA-DQA1*01-B1*05L HLA-DQA1*03:01-B1*03:02L
  source 1..10: note = Severe acute respiratory syndrome coronavirus 2
LKYDFTEERL

SEQ ID NO: 22921 - protein, 10 aa, Severe acute respiratory syndrome-related coronavirus
  REGION 1..10: note = Table B: HLA-DQA1*01-B1*05L HLA-DPA1*03:01-B1*105:01L HLA-DQA1*03:01-B1*03:02L HLA-DPA1*01:02-B1*04:01L HLA-DRB1*16:01L HLA-DQA1*02:01-B1*03:03L
  source 1..10: note = Severe acute respiratory syndrome coronavirus 2
KYWDQTYHPN

SEQ ID NO: 22922 - protein, 13 aa, Severe acute respiratory syndrome-related coronavirus
  REGION 1..13: note = Table B: HLA-DQA1*01-B1*05L HLA-DRB1*16:01L
  source 1..13: note = Severe acute respiratory syndrome coronavirus 2
GPLVRKIFVDGVP

SEQ ID NO: 22923 - protein, 10 aa, Severe acute respiratory syndrome-related coronavirus
  REGION 1..10: note = Table B: HLA-DQA1*01-B1*05L
  source 1..10: note = Severe acute respiratory syndrome coronavirus 2
LLVYAADPAM

SEQ ID NO: 22924 - protein, 11 aa, Severe acute respiratory syndrome-related coronavirus
  REGION 1..11: note = Table B: HLA-DQA1*01-B1*05L
  source 1..11: note = Severe acute respiratory syndrome coronavirus 2
KPGNFNKDFYD

SEQ ID NO: 22925 - protein, 10 aa, Severe acute respiratory syndrome-related coronavirus
  REGION 1..10: note = Table B: HLA-DQA1*01-B1*05L
  source 1..10: note = Severe acute respiratory syndrome coronavirus 2
NKDFYDFAVS

SEQ ID NO: 22926 - protein, 10 aa, Severe acute respiratory syndrome-related coronavirus
  REGION 1..10: note = Table B: HLA-DQA1*01-B1*05L HLA-DQA1*03:01-B1*03:02L HLA-DQA1*02:01-B1*03:03L
  source 1..10: note = Severe acute respiratory syndrome coronavirus 2
DFYDFAVSKG

SEQ ID NO: 22927 - protein, 13 aa, Severe acute respiratory syndrome-related coronavirus
  REGION 1..13: note = Table B: HLA-DQA1*01-B1*05L HLA-DPA1*03:01-B1*105:01L
  source 1..13: note = Severe acute respiratory syndrome coronavirus 2
FAVSKGFFKEGSS

SEQ ID NO: 22928 - protein, 10 aa, Severe acute respiratory syndrome-related coronavirus
  REGION 1..10: note = Table B: HLA-DQA1*01-B1*05L HLA-DQA1*03:01-B1*03:02L
  source 1..10: note = Severe acute respiratory syndrome coronavirus 2
GFFKEGSSVE

SEQ ID NO: 22929 - protein, 12 aa, Severe acute respiratory syndrome-related coronavirus
  REGION 1..12: note = Table B: HLA-DQA1*01-B1*05L
  source 1..12: note = Severe acute respiratory syndrome coronavirus 2
LKHFFFAQDGNA

SEQ ID NO: 22930 - protein, 12 aa, Severe acute respiratory syndrome-related coronavirus
  REGION 1..12: note = Table B: HLA-DQA1*01-B1*05L
  source 1..12: note = Severe acute respiratory syndrome coronavirus 2
DGNAAISDYDYY

SEQ ID NO: 22931 - protein, 11 aa, Severe acute respiratory syndrome-related coronavirus
  REGION 1..11: note = Table B: HLA-DQA1*01-B1*05L
  source 1..11: note = Severe acute respiratory syndrome coronavirus 2
NAAISDYDYYR

SEQ ID NO: 22932 - protein, 10 aa, Severe acute respiratory syndrome-related coronavirus
  REGION 1..10: note = Table B: HLA-DQA1*01-B1*05L
  source 1..10: note = Severe acute respiratory syndrome coronavirus 2
ISDYDYYRYN

SEQ ID NO: 22933 - protein, 12 aa, Severe acute respiratory syndrome-related coronavirus
  REGION 1..12: note = Table B: HLA-DQA1*01-B1*05L
  source 1..12: note = Severe acute respiratory syndrome coronavirus 2
SDYDYYRYNLPT

SEQ ID NO: 22934 - protein, 12 aa, Severe acute respiratory syndrome-related coronavirus
  REGION 1..12: note = Table B: HLA-DQA1*01-B1*05L HLA-DPA1*03:01-B1*105:01L HLA-DPA1*01:02-B1*04:01L
  source 1..12: note = Severe acute respiratory syndrome coronavirus 2
VVDKYFDCYDGG

SEQ ID NO: 22935 - protein, 12 aa, Severe acute respiratory syndrome-related coronavirus
  REGION 1..12: note = Table B: HLA-DQA1*01-B1*05L
  source 1..12: note = Severe acute respiratory syndrome coronavirus 2
WGKARLYYDSMS

SEQ ID NO: 22936 - protein, 11 aa, Severe acute respiratory syndrome-related coronavirus
  REGION 1..11: note = Table B: HLA-DQA1*01-B1*05L
  source 1..11: note = Severe acute respiratory syndrome coronavirus 2
ARLYYDSMSYE

SEQ ID NO: 22937 - protein, 11 aa, Severe acute respiratory syndrome-related coronavirus
  REGION 1..11: note = Table B: HLA-DQA1*01-B1*05L
  source 1..11: note = Severe acute respiratory syndrome coronavirus 2
RLYYDSMSYED

SEQ ID NO: 22938 - protein, 11 aa, Severe acute respiratory syndrome-related coronavirus
  REGION 1..11: note = Table B: HLA-DQA1*01-B1*05L
  source 1..11: note = Severe acute respiratory syndrome coronavirus 2
LYYDSMSYEDQ

SEQ ID NO: 22939 - protein, 11 aa, Severe acute respiratory syndrome-related coronavirus
  REGION 1..11: note = Table B: HLA-DQA1*01-B1*05L
  source 1..11: note = Severe acute respiratory syndrome coronavirus 2
YYDSMSYEDQD

SEQ ID NO: 22940 - protein, 10 aa, Severe acute respiratory syndrome-related coronavirus
  REGION 1..10: note = Table B: HLA-DQA1*01-B1*05L
  source 1..10: note = Severe acute respiratory syndrome coronavirus 2
DSMSYEDQDA

SEQ ID NO: 22941 - protein, 10 aa, Severe acute respiratory syndrome-related coronavirus
  REGION 1..10: note = Table B: HLA-DQA1*01-B1*05L
  source 1..10: note = Severe acute respiratory syndrome coronavirus 2
SYEDQDALFA

SEQ ID NO: 22942 - protein, 16 aa, Severe acute respiratory syndrome-related coronavirus
  REGION 1..16: note = Table B: HLA-DQA1*01-B1*05L
  source 1..16: note = Severe acute respiratory syndrome coronavirus 2
DQDALFAYTKRNVIPT

SEQ ID NO: 22943 - protein, 16 aa, Severe acute respiratory syndrome-related coronavirus
  REGION 1..16: note = Table B: HLA-DQA1*01-B1*05L
  source 1..16: note = Severe acute respiratory syndrome coronavirus 2
DALFAYTKRNVIPTIT

SEQ ID NO: 22944 - protein, 13 aa, Severe acute respiratory syndrome-related coronavirus
  REGION 1..13: note = Table B: HLA-DQA1*01-B1*05L HLA-DRB1*16:01L HLA-DRB1*15:03L
  source 1..13: note = Severe acute respiratory syndrome coronavirus 2
IGTSKFYGGWHNM

SEQ ID NO: 22945 - protein, 10 aa, Severe acute respiratory syndrome-related coronavirus
  REGION 1..10: note = Table B: HLA-DQA1*01-B1*05L
  source 1..10: note = Severe acute respiratory syndrome coronavirus 2
MLKTVYSDVE

SEQ ID NO: 22946 - protein, 10 aa, Severe acute respiratory syndrome-related coronavirus
  REGION 1..10: note = Table B: HLA-DQA1*01-B1*05L
  source 1..10: note = Severe acute respiratory syndrome coronavirus 2
KTVYSDVENP

SEQ ID NO: 22947 - protein, 10 aa, Severe acute respiratory syndrome-related coronavirus
  REGION 1..10: note = Table B: HLA-DQA1*01-B1*05L
  source 1..10: note = Severe acute respiratory syndrome coronavirus 2
SDVENPHLMG

SEQ ID NO: 22948 - protein, 12 aa, Severe acute respiratory syndrome-related coronavirus
  REGION 1..12: note = Table B: HLA-DQA1*01-B1*05L
  source 1..12: note = Severe acute respiratory syndrome coronavirus 2
GDATTAYANSVF

SEQ ID NO: 22949 - protein, 10 aa, Severe acute respiratory syndrome-related coronavirus
  REGION 1..10: note = Table B: HLA-DQA1*01-B1*05L
  source 1..10: note = Severe acute respiratory syndrome coronavirus 2
NRDVDTDFVN

SEQ ID NO: 22950 - protein, 10 aa, Severe acute respiratory syndrome-related coronavirus
  REGION 1..10: note = Table B: HLA-DQA1*01-B1*05L
  source 1..10: note = Severe acute respiratory syndrome coronavirus 2
RDVDTDFVNE

SEQ ID NO: 22951 - protein, 13 aa, Severe acute respiratory syndrome-related coronavirus
  REGION 1..13: note = Table B: HLA-DQA1*01-B1*05L HLA-DPA1*03:01-B1*105:01L
  source 1..13: note = Severe acute respiratory syndrome coronavirus 2
KHFSMMILSDDAV

SEQ ID NO: 22952 - protein, 13 aa, Severe acute respiratory syndrome-related coronavirus
  REGION 1..13: note = Table B: HLA-DQA1*01-B1*05L HLA-DQA1*05:01-B1*02:01L
  source 1..13: note = Severe acute respiratory syndrome coronavirus 2
HFSMMILSDDAVV

SEQ ID NO: 22953 - protein, 13 aa, Severe acute respiratory syndrome-related coronavirus
  REGION 1..13: note = Table B: HLA-DQA1*01-B1*05L HLA-DQA1*05:01-B1*02:01L
  source 1..13: note = Severe acute respiratory syndrome coronavirus 2
FNSTYASQGLVAS

SEQ ID NO: 22954 - protein, 10 aa, Severe acute respiratory syndrome-related coronavirus
  REGION 1..10: note = Table B: HLA-DQA1*01-B1*05L HLA-DRB1*16:01L HLA-DRB1*15:03L
  source 1..10: note = Severe acute respiratory syndrome coronavirus 2
VLYYQNNVFM

SEQ ID NO: 22955 - protein, 12 aa, Severe acute respiratory syndrome-related coronavirus
  REGION 1..12: note = Table B: HLA-DQA1*01-B1*05L
  source 1..12: note = Severe acute respiratory syndrome coronavirus 2
SEAKCWTETDLT

SEQ ID NO: 22956 - protein, 10 aa, Severe acute respiratory syndrome-related coronavirus
  REGION 1..10: note = Table B: HLA-DQA1*01-B1*05L
  source 1..10: note = Severe acute respiratory syndrome coronavirus 2
DYVYLPYPDP

SEQ ID NO: 22957 - protein, 10 aa, Severe acute respiratory syndrome-related coronavirus
  REGION 1..10: note = Table B: HLA-DQA1*01-B1*05L HLA-DQA1*01:03-B1*06:01L
  source 1..10: note = Severe acute respiratory syndrome coronavirus 2
AGCFVDDIVK

SEQ ID NO: 22958 - protein, 11 aa, Severe acute respiratory syndrome-related coronavirus
  REGION 1..11: note = Table B: HLA-DQA1*01-B1*05L HLA-DRB1*15:03L
  source 1..11: note = Severe acute respiratory syndrome coronavirus 2
MIERFVSLAID

SEQ ID NO: 22959 - protein, 13 aa, Severe acute respiratory syndrome-related coronavirus
  REGION 1..13: note = Table B: HLA-DQA1*01-B1*05L
  source 1..13: note = Severe acute respiratory syndrome coronavirus 2
RFVSLAIDAYPLT

SEQ ID NO: 22960 - protein, 10 aa, Severe acute respiratory syndrome-related coronavirus
  REGION 1..10: note = Table B: HLA-DQA1*01-B1*05L HLA-DQA1*03:01-B1*03:02L
  source 1..10: note = Severe acute respiratory syndrome coronavirus 2
PNQEYADVFH

SEQ ID NO: 22961 - protein, 11 aa, Severe acute respiratory syndrome-related coronavirus
  REGION 1..11: note = Table B: HLA-DQA1*01-B1*05L
  source 1..11: note = Severe acute respiratory syndrome coronavirus 2
NTSRYWEPEFY

SEQ ID NO: 22962 - protein, 10 aa, Severe acute respiratory syndrome-related coronavirus
  REGION 1..10: note = Table B: HLA-DQA1*01-B1*05L
  source 1..10: note = Severe acute respiratory syndrome coronavirus 2
SRYWEPEFYE

SEQ ID NO: 22963 - protein, 13 aa, Severe acute respiratory syndrome-related coronavirus
  REGION 1..13: note = Table B: HLA-DQA1*01-B1*05L
  source 1..13: note = Severe acute respiratory syndrome coronavirus 2
APGCDVTDVTQLY

SEQ ID NO: 22964 - protein, 12 aa, Severe acute respiratory syndrome-related coronavirus
  REGION 1..12: note = Table B: HLA-DQA1*01-B1*05L HLA-DQA1*05:01-B1*02:01L
  source 1..12: note = Severe acute respiratory syndrome coronavirus 2
VGSDNVTDFNAI

SEQ ID NO: 22965 - protein, 12 aa, Severe acute respiratory syndrome-related coronavirus
  REGION 1..12: note = Table B: HLA-DQA1*01-B1*05L HLA-DQA1*05:01-B1*02:01L
  source 1..12: note = Severe acute respiratory syndrome coronavirus 2
GSDNVTDFNAIA

SEQ ID NO: 22966 - protein, 11 aa, Severe acute respiratory syndrome-related coronavirus
  REGION 1..11: note = Table B: HLA-DQA1*01-B1*05L
  source 1..11: note = Severe acute respiratory syndrome coronavirus 2
DNVTDFNAIAT

SEQ ID NO: 22967 - protein, 13 aa, Severe acute respiratory syndrome-related coronavirus
  REGION 1..13: note = Table B: HLA-DQA1*01-B1*05L HLA-DQA1*05:05-B1*03:19L HLA-DQA1*05:01-B1*02:01L
  source 1..13: note = Severe acute respiratory syndrome coronavirus 2
AIATCDWTNAGDY

SEQ ID NO: 22968 - protein, 11 aa, Severe acute respiratory syndrome-related coronavirus
  REGION 1..11: note = Table B: HLA-DQA1*01-B1*05L
  source 1..11: note = Severe acute respiratory syndrome coronavirus 2
ERLKLFAAETL

SEQ ID NO: 22969 - protein, 11 aa, Severe acute respiratory syndrome-related coronavirus
  REGION 1..11: note = Table B: HLA-DQA1*01-B1*05L HLA-DQA1*05:01-B1*02:01L HLA-DQA1*01:03-B1*06:01L
  source 1..11: note = Severe acute respiratory syndrome coronavirus 2
AAETLKATEET

SEQ ID NO: 22970 - protein, 10 aa, Severe acute respiratory syndrome-related coronavirus
  REGION 1..10: note = Table B: HLA-DQA1*01-B1*05L
  source 1..10: note = Severe acute respiratory syndrome coronavirus 2
VREVLSDREL

SEQ ID NO: 22971 - protein, 10 aa, Severe acute respiratory syndrome-related coronavirus
  REGION 1..10: note = Table B: HLA-DQA1*01-B1*05L HLA-DQA1*03:01-B1*03:02L
  source 1..10: note = Severe acute respiratory syndrome coronavirus 2
EYTFEKGDYG

SEQ ID NO: 22972 - protein, 10 aa, Severe acute respiratory syndrome-related coronavirus
  REGION 1..10: note = Table B: HLA-DQA1*01-B1*05L
  source 1..10: note = Severe acute respiratory syndrome coronavirus 2
TFEKGDYGDA

SEQ ID NO: 22973 - protein, 11 aa, Severe acute respiratory syndrome-related coronavirus
  REGION 1..11: note = Table B: HLA-DQA1*01-B1*05L HLA-DQA1*05:01-B1*02:01L
  source 1..11: note = Severe acute respiratory syndrome coronavirus 2
FEKGDYGDAVV

SEQ ID NO: 22974 - protein, 11 aa, Severe acute respiratory syndrome-related coronavirus
  REGION 1..11: note = Table B: HLA-DQA1*01-B1*05L HLA-DPA1*03:01-B1*105:01L HLA-DQA1*03:01-B1*03:02L HLA-DQA1*01:03-B1*06:01L
  source 1..11: note = Severe acute respiratory syndrome coronavirus 2
VGDYFVLTSHT

SEQ ID NO: 22975 - protein, 12 aa, Severe acute respiratory syndrome-related coronavirus
  REGION 1..12: note = Table B: HLA-DQA1*01-B1*05L HLA-DRB1*15:03L
  source 1..12: note = Severe acute respiratory syndrome coronavirus 2
IGLALYYPSARI

SEQ ID NO: 22976 - protein, 14 aa, Severe acute respiratory syndrome-related coronavirus
  REGION 1..14: note = Table B: HLA-DQA1*01-B1*05L HLA-DRB1*16:01L
  source 1..14: note = Severe acute respiratory syndrome coronavirus 2
VNSTLEQYVFCTVN

SEQ ID NO: 22977 - protein, 10 aa, Severe acute respiratory syndrome-related coronavirus
  REGION 1..10: note = Table B: HLA-DQA1*01-B1*05L HLA-DQA1*05:01-B1*02:01L HLA-DRB1*15:03L
  source 1..10: note = Severe acute respiratory syndrome coronavirus 2
DIVVFDEISM

SEQ ID NO: 22978 - protein, 10 aa, Severe acute respiratory syndrome-related coronavirus
  REGION 1..10: note = Table B: HLA-DQA1*01-B1*05L HLA-DRB1*15:03L
  source 1..10: note = Severe acute respiratory syndrome coronavirus 2
IVVFDEISMA

SEQ ID NO: 22979 - protein, 12 aa, Severe acute respiratory syndrome-related coronavirus
  REGION 1..12: note = Table B: HLA-DQA1*01-B1*05L HLA-DRB1*15:03L
  source 1..12: note = Severe acute respiratory syndrome coronavirus 2
ISMATNYDLSVV

SEQ ID NO: 22980 - protein, 12 aa, Severe acute respiratory syndrome-related coronavirus
  REGION 1..12: note = Table B: HLA-DQA1*01-B1*05L HLA-DQA1*05:01-B1*02:01L HLA-DQA1*03:01-B1*03:02L
  source 1..12: note = Severe acute respiratory syndrome coronavirus 2
SMATNYDLSVVN

SEQ ID NO: 22981 - protein, 11 aa, Severe acute respiratory syndrome-related coronavirus
  REGION 1..11: note = Table B: HLA-DQA1*01-B1*05L HLA-DQA1*01:03-B1*06:01L
  source 1..11: note = Severe acute respiratory syndrome coronavirus 2
TKGTLEPEYFN

SEQ ID NO: 22982 - protein, 13 aa, Severe acute respiratory syndrome-related coronavirus
  REGION 1..13: note = Table B: HLA-DQA1*01-B1*05L
  source 1..13: note = Severe acute respiratory syndrome coronavirus 2
VASKILGLPTQTV

SEQ ID NO: 22983 - protein, 12 aa, Severe acute respiratory syndrome-related coronavirus
  REGION 1..12: note = Table B: HLA-DQA1*01-B1*05L HLA-DQA1*01:03-B1*06:01L
  source 1..12: note = Severe acute respiratory syndrome coronavirus 2
VDSSQGSEYDYV

SEQ ID NO: 22984 - protein, 12 aa, Severe acute respiratory syndrome-related coronavirus
  REGION 1..12: note = Table B: HLA-DQA1*01-B1*05L
  source 1..12: note = Severe acute respiratory syndrome coronavirus 2
SQGSEYDYVIFT

SEQ ID NO: 22985 - protein, 12 aa, Severe acute respiratory syndrome-related coronavirus
  REGION 1..12: note = Table B: HLA-DQA1*01-B1*05L HLA-DPA1*01:03-B1*04:01L HLA-DPA1*01:03-B1*04:02L HLA-DPA1*03:01-B1*105:01L
  source 1..12: note = Severe acute respiratory syndrome coronavirus 2
SEYDYVIFTQTT

SEQ ID NO: 22986 - protein, 13 aa, Severe acute respiratory syndrome-related coronavirus
  REGION 1..13: note = Table B: HLA-DQA1*01-B1*05L HLA-DRB1*15:03L
  source 1..13: note = Severe acute respiratory syndrome coronavirus 2
VGILCIMSDRDLY

SEQ ID NO: 22987 - protein, 12 aa, Severe acute respiratory syndrome-related coronavirus
  REGION 1..12: note = Table B: HLA-DQA1*01-B1*05L HLA-DRB1*15:03L
  source 1..12: note = Severe acute respiratory syndrome coronavirus 2
ILCIMSDRDLYD

SEQ ID NO: 22988 - protein, 12 aa, Severe acute respiratory syndrome-related coronavirus
  REGION 1..12: note = Table B: HLA-DQA1*01-B1*05L
  source 1..12: note = Severe acute respiratory syndrome coronavirus 2
YDKLQFTSLEIP

SEQ ID NO: 22989 - protein, 10 aa, Severe acute respiratory syndrome-related coronavirus
  REGION 1..10: note = Table B: HLA-DQA1*01-B1*05L
  source 1..10: note = Severe acute respiratory syndrome coronavirus 2
VNGYPNMFIT

SEQ ID NO: 22990 - protein, 10 aa, Severe acute respiratory syndrome-related coronavirus
  REGION 1..10: note = Table B: HLA-DQA1*01-B1*05L HLA-DRB1*15:03L
  source 1..10: note = Severe acute respiratory syndrome coronavirus 2
VRAWIGFDVE

SEQ ID NO: 22991 - protein, 10 aa, Severe acute respiratory syndrome-related coronavirus
  REGION 1..10: note = Table B: HLA-DQA1*01-B1*05L
  source 1..10: note = Severe acute respiratory syndrome coronavirus 2
RAWIGFDVEG

SEQ ID NO: 22992 - protein, 10 aa, Severe acute respiratory syndrome-related coronavirus
  REGION 1..10: note = Table B: HLA-DQA1*01-B1*05L
  source 1..10: note = Severe acute respiratory syndrome coronavirus 2
VPTGYVDTPN

SEQ ID NO: 22993 - protein, 10 aa, Severe acute respiratory syndrome-related coronavirus
  REGION 1..10: note = Table B: HLA-DQA1*01-B1*05L
  source 1..10: note = Severe acute respiratory syndrome coronavirus 2
PTGYVDTPNN

SEQ ID NO: 22994 - protein, 11 aa, Severe acute respiratory syndrome-related coronavirus
  REGION 1..11: note = Table B: HLA-DQA1*01-B1*05L
  source 1..11: note = Severe acute respiratory syndrome coronavirus 2
IKIVQMLSDTL

SEQ ID NO: 22995 - protein, 12 aa, Severe acute respiratory syndrome-related coronavirus
  REGION 1..12: note = Table B: HLA-DQA1*01-B1*05L
  source 1..12: note = Severe acute respiratory syndrome coronavirus 2
HHSIGFDYVYNP

SEQ ID NO: 22996 - protein, 10 aa, Severe acute respiratory syndrome-related coronavirus
  REGION 1..10: note = Table B: HLA-DQA1*01-B1*05L
  source 1..10: note = Severe acute respiratory syndrome coronavirus 2
YNPFMIDVQQ

SEQ ID NO: 22997 - protein, 12 aa, Severe acute respiratory syndrome-related coronavirus
  REGION 1..12: note = Table B: HLA-DQA1*01-B1*05L HLA-DQA1*05:01-B1*02:01L HLA-DQA1*03:01-B1*03:02L
  source 1..12: note = Severe acute respiratory syndrome coronavirus 2
IDVQQWGFTGNL

SEQ ID NO: 22998 - protein, 11 aa, Severe acute respiratory syndrome-related coronavirus
  REGION 1..11: note = Table B: HLA-DQA1*01-B1*05L
  source 1..11: note = Severe acute respiratory syndrome coronavirus 2
VQQWGFTGNLQ

SEQ ID NO: 22999 - protein, 10 aa, Severe acute respiratory syndrome-related coronavirus
  REGION 1..10: note = Table B: HLA-DQA1*01-B1*05L HLA-DQA1*03:01-B1*03:02L
  source 1..10: note = Severe acute respiratory syndrome coronavirus 2
EYPIIGDELK

SEQ ID NO: 23000 - protein, 13 aa, Severe acute respiratory syndrome-related coronavirus
  REGION 1..13: note = Table B: HLA-DQA1*01-B1*05L HLA-DQA1*03:01-B1*03:02L
  source 1..13: note = Severe acute respiratory syndrome coronavirus 2
ADKFPVLHDIGNP

SEQ ID NO: 23001 - protein, 11 aa, Severe acute respiratory syndrome-related coronavirus
  REGION 1..11: note = Table B: HLA-DQA1*01-B1*05L
  source 1..11: note = Severe acute respiratory syndrome coronavirus 2
VPQADVEWKFY

SEQ ID NO: 23002 - protein, 12 aa, Severe acute respiratory syndrome-related coronavirus
  REGION 1..12: note = Table B: HLA-DQA1*01-B1*05L
  source 1..12: note = Severe acute respiratory syndrome coronavirus 2
DVEWKFYDAQPC

SEQ ID NO: 23003 - protein, 12 aa, Severe acute respiratory syndrome-related coronavirus
  REGION 1..12: note = Table B: HLA-DQA1*01-B1*05L HLA-DPA1*01:02-B1*04:01L
  source 1..12: note = Severe acute respiratory syndrome coronavirus 2
KIEELFYSYATH

SEQ ID NO: 23004 - protein, 12 aa, Severe acute respiratory syndrome-related coronavirus
  REGION 1..12: note = Table B: HLA-DQA1*01-B1*05L
  source 1..12: note = Severe acute respiratory syndrome coronavirus 2
IEELFYSYATHS

SEQ ID NO: 23005 - protein, 11 aa, Severe acute respiratory syndrome-related coronavirus
  REGION 1..11: note = Table B: HLA-DQA1*01-B1*05L HLA-DQA1*03:01-B1*03:02L
  source 1..11: note = Severe acute respiratory syndrome coronavirus 2
ELFYSYATHSD

SEQ ID NO: 23006 - protein, 11 aa, Severe acute respiratory syndrome-related coronavirus
  REGION 1..11: note = Table B: HLA-DQA1*01-B1*05L HLA-DQA1*03:01-B1*03:02L
  source 1..11: note = Severe acute respiratory syndrome coronavirus 2
YSYATHSDKFT

SEQ ID NO: 23007 - protein, 10 aa, Severe acute respiratory syndrome-related coronavirus
  REGION 1..10: note = Table B: HLA-DQA1*01-B1*05L HLA-DRB1*16:01L
  source 1..10: note = Severe acute respiratory syndrome coronavirus 2
FHTPAFDKSA

SEQ ID NO: 23008 - protein, 10 aa, Severe acute respiratory syndrome-related coronavirus
  REGION 1..10: note = Table B: HLA-DQA1*01-B1*05L
  source 1..10: note = Severe acute respiratory syndrome coronavirus 2
TPAFDKSAFV

SEQ ID NO: 23009 - protein, 13 aa, Severe acute respiratory syndrome-related coronavirus
  REGION 1..13: note = Table B: HLA-DQA1*01-B1*05L
  source 1..13: note = Severe acute respiratory syndrome coronavirus 2
KQLPFFYYSDSPC

SEQ ID NO: 23010 - protein, 11 aa, Severe acute respiratory syndrome-related coronavirus
  REGION 1..11: note = Table B: HLA-DQA1*01-B1*05L
  source 1..11: note = Severe acute respiratory syndrome coronavirus 2
PFFYYSDSPCE

SEQ ID NO: 23011 - protein, 12 aa, Severe acute respiratory syndrome-related coronavirus
  REGION 1..12: note = Table B: HLA-DQA1*01-B1*05L
  source 1..12: note = Severe acute respiratory syndrome coronavirus 2
GKQVVSDIDYVP

SEQ ID NO: 23012 - protein, 10 aa, Severe acute respiratory syndrome-related coronavirus
  REGION 1..10: note = Table B: HLA-DQA1*01-B1*05L
  source 1..10: note = Severe acute respiratory syndrome coronavirus 2
EYRLYLDAYN

SEQ ID NO: 23013 - protein, 10 aa, Severe acute respiratory syndrome-related coronavirus
  REGION 1..10: note = Table B: HLA-DQA1*01-B1*05L
  source 1..10: note = Severe acute respiratory syndrome coronavirus 2
YRLYLDAYNM

SEQ ID NO: 23014 - protein, 11 aa, Severe acute respiratory syndrome-related coronavirus
  REGION 1..11: note = Table B: HLA-DQA1*01-B1*05L HLA-DPA1*01:02-B1*04:01L
  source 1..11: note = Severe acute respiratory syndrome coronavirus 2
FSLWVYKQFDT

SEQ ID NO: 23015 - protein, 10 aa, Severe acute respiratory syndrome-related coronavirus
  REGION 1..10: note = Table B: HLA-DQA1*01-B1*05L HLA-DPA1*02:01-B1*13:01L HLA-DPA1*01:02-B1*04:01L HLA-DRB1*16:01L HLA-DQA1*01:03-B1*06:01L HLA-DQA1*02:01-B1*03:03L HLA-DRB1*15:03L
  source 1..10: note = Severe acute respiratory syndrome coronavirus 2
VYKQFDTYNL

SEQ ID NO: 23016 - protein, 11 aa, Severe acute respiratory syndrome-related coronavirus
  REGION 1..11: note = Table B: HLA-DQA1*01-B1*05L HLA-DRB1*16:01L
  source 1..11: note = Severe acute respiratory syndrome coronavirus 2
YKQFDTYNLWN

SEQ ID NO: 23017 - protein, 11 aa, Severe acute respiratory syndrome-related coronavirus
  REGION 1..11: note = Table B: HLA-DQA1*01-B1*05L
  source 1..11: note = Severe acute respiratory syndrome coronavirus 2
KQFDTYNLWNT

SEQ ID NO: 23018 - protein, 11 aa, Severe acute respiratory syndrome-related coronavirus
  REGION 1..11: note = Table B: HLA-DQA1*01-B1*05L HLA-DPA1*01:02-B1*04:01L
  source 1..11: note = Severe acute respiratory syndrome coronavirus 2
GVDVELFENKT

SEQ ID NO: 23019 - protein, 10 aa, Severe acute respiratory syndrome-related coronavirus
  REGION 1..10: note = Table B: HLA-DQA1*01-B1*05L
  source 1..10: note = Severe acute respiratory syndrome coronavirus 2
DVELFENKTT

SEQ ID NO: 23020 - protein, 11 aa, Severe acute respiratory syndrome-related coronavirus
  REGION 1..11: note = Table B: HLA-DQA1*01-B1*05L
  source 1..11: note = Severe acute respiratory syndrome coronavirus 2
APLTVFFDGRV

SEQ ID NO: 23021 - protein, 10 aa, Severe acute respiratory syndrome-related coronavirus
  REGION 1..10: note = Table B: HLA-DQA1*01-B1*05L
  source 1..10: note = Severe acute respiratory syndrome coronavirus 2
LTVFFDGRVD

SEQ ID NO: 23022 - protein, 10 aa, Severe acute respiratory syndrome-related coronavirus
  REGION 1..10: note = Table B: HLA-DQA1*01-B1*05L HLA-DQA1*03:01-B1*03:02L
  source 1..10: note = Severe acute respiratory syndrome coronavirus 2
TVFFDGRVDG

SEQ ID NO: 23023 - protein, 10 aa, Severe acute respiratory syndrome-related coronavirus
  REGION 1..10: note = Table B: HLA-DQA1*01-B1*05L
  source 1..10: note = Severe acute respiratory syndrome coronavirus 2
VFFDGRVDGQ

SEQ ID NO: 23024 - protein, 10 aa, Severe acute respiratory syndrome-related coronavirus
  REGION 1..10: note = Table B: HLA-DQA1*01-B1*05L HLA-DQA1*03:01-B1*03:02L
  source 1..10: note = Severe acute respiratory syndrome coronavirus 2
DGRVDGQVDL

SEQ ID NO: 23025 - protein, 11 aa, Severe acute respiratory syndrome-related coronavirus
  REGION 1..11: note = Table B: HLA-DQA1*01-B1*05L HLA-DQA1*03:01-B1*03:02L HLA-DQA1*02:01-B1*03:03L
  source 1..11: note = Severe acute respiratory syndrome coronavirus 2
LPETYFTQSRN

SEQ ID NO: 23026 - protein, 11 aa, Severe acute respiratory syndrome-related coronavirus
  REGION 1..11: note = Table B: HLA-DQA1*01-B1*05L
  source 1..11: note = Severe acute respiratory syndrome coronavirus 2
KPRSQMEIDFL

SEQ ID NO: 23027 - protein, 14 aa, Severe acute respiratory syndrome-related coronavirus
  REGION 1..14: note = Table B: HLA-DQA1*01-B1*05L HLA-DQA1*05:01-B1*02:01L HLA-DPA1*03:01-B1*105:01L
  source 1..14: note = Severe acute respiratory syndrome coronavirus 2
SQMEIDFLELAMDE

SEQ ID NO: 23028 - protein, 11 aa, Severe acute respiratory syndrome-related coronavirus
  REGION 1..11: note = Table B: HLA-DQA1*01-B1*05L
  source 1..11: note = Severe acute respiratory syndrome coronavirus 2
FEHIVYGDFSH

SEQ ID NO: 23029 - protein, 11 aa, Severe acute respiratory syndrome-related coronavirus
  REGION 1..11: note = Table B: HLA-DQA1*01-B1*05L HLA-DPA1*01:02-B1*04:01L
  source 1..11: note = Severe acute respiratory syndrome coronavirus 2
EHIVYGDFSHS

SEQ ID NO: 23030 - protein, 11 aa, Severe acute respiratory syndrome-related coronavirus
  REGION 1..11: note = Table B: HLA-DQA1*01-B1*05L HLA-DPA1*01:03-B1*04:02L HLA-DRB1*16:01L HLA-DQA1*01:03-B1*06:01L HLA-DRB1*04:08L
  source 1..11: note = Severe acute respiratory syndrome coronavirus 2
PFELEDFIPMD

SEQ ID NO: 23031 - protein, 11 aa, Severe acute respiratory syndrome-related coronavirus
  REGION 1..11: note = Table B: HLA-DQA1*01-B1*05L
  source 1..11: note = Severe acute respiratory syndrome coronavirus 2
ELEDFIPMDST

SEQ ID NO: 23032 - protein, 12 aa, Severe acute respiratory syndrome-related coronavirus
  REGION 1..12: note = Table B: HLA-DQA1*01-B1*05L HLA-DQA1*03:01-B1*03:02L HLA-DQA1*01:03-B1*06:01L HLA-DQA1*02:01-B1*03:03L
  source 1..12: note = Severe acute respiratory syndrome coronavirus 2
STVKNYFITDAQ

SEQ ID NO: 23033 - protein, 12 aa, Severe acute respiratory syndrome-related coronavirus
  REGION 1..12: note = Table B: HLA-DQA1*01-B1*05L
  source 1..12: note = Severe acute respiratory syndrome coronavirus 2
TVKNYFITDAQT

SEQ ID NO: 23034 - protein, 10 aa, Severe acute respiratory syndrome-related coronavirus
  REGION 1..10: note = Table B: HLA-DQA1*01-B1*05L
  source 1..10: note = Severe acute respiratory syndrome coronavirus 2
NYFITDAQTG

SEQ ID NO: 23035 - protein, 11 aa, Severe acute respiratory syndrome-related coronavirus
  REGION 1..11: note = Table B: HLA-DQA1*01-B1*05L
  source 1..11: note = Severe acute respiratory syndrome coronavirus 2
VIDLLLDDFVE

SEQ ID NO: 23036 - protein, 11 aa, Severe acute respiratory syndrome-related coronavirus
  REGION 1..11: note = Table B: HLA-DQA1*01-B1*05L HLA-DPA1*01:02-B1*04:01L
  source 1..11: note = Severe acute respiratory syndrome coronavirus 2
GHVETFYPKLQ

SEQ ID NO: 23037 - protein, 10 aa, Severe acute respiratory syndrome-related coronavirus
  REGION 1..10: note = Table B: HLA-DQA1*01-B1*05L
  source 1..10: note = Severe acute respiratory syndrome coronavirus 2
DLQNYGDSAT

SEQ ID NO: 23038 - protein, 10 aa, Severe acute respiratory syndrome-related coronavirus
  REGION 1..10: note = Table B: HLA-DQA1*01-B1*05L
  source 1..10: note = Severe acute respiratory syndrome coronavirus 2
LQNYGDSATL

SEQ ID NO: 23039 - protein, 10 aa, Severe acute respiratory syndrome-related coronavirus
  REGION 1..10: note = Table B: HLA-DQA1*01-B1*05L
  source 1..10: note = Severe acute respiratory syndrome coronavirus 2
LRQWLPTGTL

SEQ ID NO: 23040 - protein, 12 aa, Severe acute respiratory syndrome-related coronavirus
  REGION 1..12: note = Table B: HLA-DQA1*01-B1*05L HLA-DQA1*05:01-B1*02:01L
  source 1..12: note = Severe acute respiratory syndrome coronavirus 2
LVDSDLNDFVSD

SEQ ID NO: 23041 - protein, 11 aa, Severe acute respiratory syndrome-related coronavirus
  REGION 1..11: note = Table B: HLA-DQA1*01-B1*05L
  source 1..11: note = Severe acute respiratory syndrome coronavirus 2
SDLNDFVSDAD

SEQ ID NO: 23042 - protein, 11 aa, Severe acute respiratory syndrome-related coronavirus
  REGION 1..11: note = Table B: HLA-DQA1*01-B1*05L
  source 1..11: note = Severe acute respiratory syndrome coronavirus 2
DLNDFVSDADS

SEQ ID NO: 23043 - protein, 11 aa, Severe acute respiratory syndrome-related coronavirus
  REGION 1..11: note = Table B: HLA-DQA1*01-B1*05L
  source 1..11: note = Severe acute respiratory syndrome coronavirus 2
LNDFVSDADST

SEQ ID NO: 23044 - protein, 12 aa, Severe acute respiratory syndrome-related coronavirus
  REGION 1..12: note = Table B: HLA-DQA1*01-B1*05L
  source 1..12: note = Severe acute respiratory syndrome coronavirus 2
TANKWDLIISDM

SEQ ID NO: 23045 - protein, 10 aa, Severe acute respiratory syndrome-related coronavirus
  REGION 1..10: note = Table B: HLA-DQA1*01-B1*05L HLA-DPA1*01:03-B1*04:02L HLA-DPA1*03:01-B1*105:01L HLA-DQA1*03:01-B1*03:02L HLA-DPA1*01:02-B1*04:01L HLA-DQA1*01:03-B1*06:01L HLA-DQA1*02:01-B1*03:03L
  source 1..10: note = Severe acute respiratory syndrome coronavirus 2
SSYSLFDMSK

SEQ ID NO: 23046 - protein, 12 aa, Severe acute respiratory syndrome-related coronavirus
  REGION 1..12: note = Table B: HLA-DQA1*01-B1*05L
  source 1..12: note = Severe acute respiratory syndrome coronavirus 2
SYSLFDMSKFPL

SEQ ID NO: 23047 - protein, 12 aa, Severe acute respiratory syndrome-related coronavirus
  REGION 1..12: note = Table B: HLA-DQA1*01-B1*05L HLA-DPA1*01:03-B1*04:02L HLA-DPA1*02:01-B1*13:01L
  source 1..12: note = Severe acute respiratory syndrome coronavirus 2
YSLFDMSKFPLK

SEQ ID NO: 23048 - protein, 12 aa, Severe acute respiratory syndrome-related coronavirus
  REGION 1..12: note = Table B: HLA-DQA1*01-B1*05L
  source 1..12: note = Severe acute respiratory syndrome coronavirus 2
FTRGVYYPDKVF

SEQ ID NO: 23049 - protein, 10 aa, Severe acute respiratory syndrome-related coronavirus
  REGION 1..10: note = Table B: HLA-DQA1*01-B1*05L
  source 1..10: note = Severe acute respiratory syndrome coronavirus 2
VYYPDKVFRS

SEQ ID NO: 23050 - protein, 11 aa, Severe acute respiratory syndrome-related coronavirus
  REGION 1..11: note = Table B: HLA-DQA1*01-B1*05L
  source 1..11: note = Severe acute respiratory syndrome coronavirus 2
VLHSTQDLFLP

SEQ ID NO: 23051 - protein, 12 aa, Severe acute respiratory syndrome-related coronavirus
  REGION 1..12: note = Table B: HLA-DQA1*01-B1*05L
  source 1..12: note = Severe acute respiratory syndrome coronavirus 2
STQDLFLPFFSN

SEQ ID NO: 23052 - protein, 11 aa, Severe acute respiratory syndrome-related coronavirus
  REGION 1..11: note = Table B: HLA-DQA1*01-B1*05L
  source 1..11: note = Severe acute respiratory syndrome coronavirus 2
DLFLPFFSNVT

SEQ ID NO: 23053 - protein, 10 aa, Severe acute respiratory syndrome-related coronavirus
  REGION 1..10: note = Table B: HLA-DQA1*01-B1*05L HLA-DRB1*16:01L HLA-DRB1*15:03L
  source 1..10: note = Severe acute respiratory syndrome coronavirus 2
VTWFHAIHVS

SEQ ID NO: 23054 - protein, 12 aa, Severe acute respiratory syndrome-related coronavirus
  REGION 1..12: note = Table B: HLA-DQA1*01-B1*05L
  source 1..12: note = Severe acute respiratory syndrome coronavirus 2
NGTKRFDNPVLP

SEQ ID NO: 23055 - protein, 12 aa, Severe acute respiratory syndrome-related coronavirus
  REGION 1..12: note = Table B: HLA-DQA1*01-B1*05L
  source 1..12: note = Severe acute respiratory syndrome coronavirus 2
TKRFDNPVLPFN

SEQ ID NO: 23056 - protein, 10 aa, Severe acute respiratory syndrome-related coronavirus
  REGION 1..10: note = Table B: HLA-DQA1*01-B1*05L
  source 1..10: note = Severe acute respiratory syndrome coronavirus 2
EFQFCNDPFL

SEQ ID NO: 23057 - protein, 13 aa, Severe acute respiratory syndrome-related coronavirus
  REGION 1..13: note = Table B: HLA-DQA1*01-B1*05L HLA-DPA1*02:01-B1*13:01L
  source 1..13: note = Severe acute respiratory syndrome coronavirus 2
YHKNNKSWMESEF

SEQ ID NO: 23058 - protein, 10 aa, Severe acute respiratory syndrome-related coronavirus
  REGION 1..10: note = Table B: HLA-DQA1*01-B1*05L
  source 1..10: note = Severe acute respiratory syndrome coronavirus 2
NKSWMESEFR

SEQ ID NO: 23059 - protein, 11 aa, Severe acute respiratory syndrome-related coronavirus
  REGION 1..11: note = Table B: HLA-DQA1*01-B1*05L
  source 1..11: note = Severe acute respiratory syndrome coronavirus 2
VSQPFLMDLEG

SEQ ID NO: 23060 - protein, 11 aa, Severe acute respiratory syndrome-related coronavirus
  REGION 1..11: note = Table B: HLA-DQA1*01-B1*05L
  source 1..11: note = Severe acute respiratory syndrome coronavirus 2
LREFVFKNIDG

SEQ ID NO: 23061 - protein, 12 aa, Severe acute respiratory syndrome-related coronavirus
  REGION 1..12: note = Table B: HLA-DQA1*01-B1*05L HLA-DQA1*03:01-B1*03:02L
  source 1..12: note = Severe acute respiratory syndrome coronavirus 2
DLPQGFSALEPL

SEQ ID NO: 23062 - protein, 13 aa, Severe acute respiratory syndrome-related coronavirus
  REGION 1..13: note = Table B: HLA-DQA1*01-B1*05L
  source 1..13: note = Severe acute respiratory syndrome coronavirus 2
GFSALEPLVDLPI

SEQ ID NO: 23063 - protein, 12 aa, Severe acute respiratory syndrome-related coronavirus
  REGION 1..12: note = Table B: HLA-DQA1*01-B1*05L
  source 1..12: note = Severe acute respiratory syndrome coronavirus 2
GAAAYYVGYLQP

SEQ ID NO: 23064 - protein, 13 aa, Severe acute respiratory syndrome-related coronavirus
  REGION 1..13: note = Table B: HLA-DQA1*01-B1*05L HLA-DQA1*05:01-B1*02:01L
  source 1..13: note = Severe acute respiratory syndrome coronavirus 2
ITDAVDCALDPLS

SEQ ID NO: 23065 - protein, 10 aa, Severe acute respiratory syndrome-related coronavirus
  REGION 1..10: note = Table B: HLA-DQA1*01-B1*05L HLA-DQA1*01:03-B1*06:01L
  source 1..10: note = Severe acute respiratory syndrome coronavirus 2
ESIVRFPNIT

SEQ ID NO: 23066 - protein, 11 aa, Severe acute respiratory syndrome-related coronavirus
  REGION 1..11: note = Table B: HLA-DQA1*01-B1*05L
  source 1..11: note = Severe acute respiratory syndrome coronavirus 2
ATRFASVYAWN

SEQ ID NO: 23067 - protein, 10 aa, Severe acute respiratory syndrome-related coronavirus
  REGION 1..10: note = Table B: HLA-DQA1*01-B1*05L
  source 1..10: note = Severe acute respiratory syndrome coronavirus 2
FTNVYADSFV

SEQ ID NO: 23068 - protein, 10 aa, Severe acute respiratory syndrome-related coronavirus
  REGION 1..10: note = Table B: HLA-DQA1*01-B1*05L
  source 1..10: note = Severe acute respiratory syndrome coronavirus 2
VYADSFVIRG

SEQ ID NO: 23069 - protein, 10 aa, Severe acute respiratory syndrome-related coronavirus
  REGION 1..10: note = Table B: HLA-DQA1*01-B1*05L
  source 1..10: note = Severe acute respiratory syndrome coronavirus 2
YNYKLPDDFT

SEQ ID NO: 23070 - protein, 12 aa, Severe acute respiratory syndrome-related coronavirus
  REGION 1..12: note = Table B: HLA-DQA1*01-B1*05L HLA-DQA1*05:01-B1*02:01L
  source 1..12: note = Severe acute respiratory syndrome coronavirus 2
AWNSNNLDSKVG

SEQ ID NO: 23071 - protein, 14 aa, Severe acute respiratory syndrome-related coronavirus
  REGION 1..14: note = Table B: HLA-DQA1*01-B1*05L
  source 1..14: note = Severe acute respiratory syndrome coronavirus 2
QPTNGVGYQPYRVV

SEQ ID NO: 23072 - protein, 10 aa, Severe acute respiratory syndrome-related coronavirus
  REGION 1..10: note = Table B: HLA-DQA1*01-B1*05L
  source 1..10: note = Severe acute respiratory syndrome coronavirus 2
YQPYRVVVLS

SEQ ID NO: 23073 - protein, 13 aa, Severe acute respiratory syndrome-related coronavirus
  REGION 1..13: note = Table B: HLA-DQA1*01-B1*05L
  source 1..13: note = Severe acute respiratory syndrome coronavirus 2
FNFNGLTGTGVLT

SEQ ID NO: 23074 - protein, 10 aa, Severe acute respiratory syndrome-related coronavirus
  REGION 1..10: note = Table B: HLA-DQA1*01-B1*05L HLA-DPA1*01:02-B1*04:01L
  source 1..10: note = Severe acute respiratory syndrome coronavirus 2
FLPFQQFGRD

SEQ ID NO: 23075 - protein, 10 aa, Severe acute respiratory syndrome-related coronavirus
  REGION 1..10: note = Table B: HLA-DQA1*01-B1*05L
  source 1..10: note = Severe acute respiratory syndrome coronavirus 2
LPFQQFGRDI

SEQ ID NO: 23076 - protein, 12 aa, Severe acute respiratory syndrome-related coronavirus
  REGION 1..12: note = Table B: HLA-DQA1*01-B1*05L HLA-DQA1*03:01-B1*03:02L
  source 1..12: note = Severe acute respiratory syndrome coronavirus 2
QQFGRDIADTTD

SEQ ID NO: 23077 - protein, 10 aa, Severe acute respiratory syndrome-related coronavirus
  REGION 1..10: note = Table B: HLA-DQA1*01-B1*05L
  source 1..10: note = Severe acute respiratory syndrome coronavirus 2
GRDIADTTDA

SEQ ID NO: 23078 - protein, 10 aa, Severe acute respiratory syndrome-related coronavirus
  REGION 1..10: note = Table B: HLA-DQA1*01-B1*05L HLA-DQA1*03:01-B1*03:02L HLA-DQA1*02:01-B1*03:03L
  source 1..10: note = Severe acute respiratory syndrome coronavirus 2
DAVRDPQTLE

SEQ ID NO: 23079 - protein, 11 aa, Severe acute respiratory syndrome-related coronavirus
  REGION 1..11: note = Table B: HLA-DQA1*01-B1*05L
  source 1..11: note = Severe acute respiratory syndrome coronavirus 2
AVRDPQTLEIL

SEQ ID NO: 23080 - protein, 12 aa, Severe acute respiratory syndrome-related coronavirus
  REGION 1..12: note = Table B: HLA-DQA1*01-B1*05L
  source 1..12: note = Severe acute respiratory syndrome coronavirus 2
LTGIAVEQDKNT

SEQ ID NO: 23081 - protein, 11 aa, Severe acute respiratory syndrome-related coronavirus
  REGION 1..11: note = Table B: HLA-DQA1*01-B1*05L
  source 1..11: note = Severe acute respiratory syndrome coronavirus 2
PSKRSFIEDLL

SEQ ID NO: 23082 - protein, 10 aa, Severe acute respiratory syndrome-related coronavirus
  REGION 1..10: note = Table B: HLA-DQA1*01-B1*05L
  source 1..10: note = Severe acute respiratory syndrome coronavirus 2
RSFIEDLLFN

SEQ ID NO: 23083 - protein, 11 aa, Severe acute respiratory syndrome-related coronavirus
  REGION 1..11: note = Table B: HLA-DQA1*01-B1*05L HLA-DRB1*15:03L
  source 1..11: note = Severe acute respiratory syndrome coronavirus 2
VTLADAGFIKQ

SEQ ID NO: 23084 - protein, 12 aa, Severe acute respiratory syndrome-related coronavirus
  REGION 1..12: note = Table B: HLA-DQA1*01-B1*05L HLA-DRB1*16:01L HLA-DRB1*15:03L
  source 1..12: note = Severe acute respiratory syndrome coronavirus 2
FIKQYGDCLGDI

SEQ ID NO: 23085 - protein, 12 aa, Severe acute respiratory syndrome-related coronavirus
  REGION 1..12: note = Table B: HLA-DQA1*01-B1*05L HLA-DQA1*05:01-B1*02:01L HLA-DQA1*03:01-B1*03:02L
  source 1..12: note = Severe acute respiratory syndrome coronavirus 2
LPPLLTDEMIAQ

SEQ ID NO: 23086 - protein, 11 aa, Severe acute respiratory syndrome-related coronavirus
  REGION 1..11: note = Table B: HLA-DQA1*01-B1*05L HLA-DRB1*15:03L
  source 1..11: note = Severe acute respiratory syndrome coronavirus 2
EMIAQYTSALL

SEQ ID NO: 23087 - protein, 12 aa, Severe acute respiratory syndrome-related coronavirus
  REGION 1..12: note = Table B: HLA-DQA1*01-B1*05L
  source 1..12: note = Severe acute respiratory syndrome coronavirus 2
QMAYRFNGIGVT

SEQ ID NO: 23088 - protein, 10 aa, Severe acute respiratory syndrome-related coronavirus
  REGION 1..10: note = Table B: HLA-DQA1*01-B1*05L
  source 1..10: note = Severe acute respiratory syndrome coronavirus 2
QNVLYENQKL

SEQ ID NO: 23089 - protein, 13 aa, Severe acute respiratory syndrome-related coronavirus
  REGION 1..13: note = Table B: HLA-DQA1*01-B1*05L HLA-DRB1*15:03L
  source 1..13: note = Severe acute respiratory syndrome coronavirus 2
SNFGAISSVLNDI

SEQ ID NO: 23090 - protein, 12 aa, Severe acute respiratory syndrome-related coronavirus
  REGION 1..12: note = Table B: HLA-DQA1*01-B1*05L
  source 1..12: note = Severe acute respiratory syndrome coronavirus 2
ISSVLNDILSRL

SEQ ID NO: 23091 - protein, 11 aa, Severe acute respiratory syndrome-related coronavirus
  REGION 1..11: note = Table B: HLA-DQA1*01-B1*05L
  source 1..11: note = Severe acute respiratory syndrome coronavirus 2
TQRNFYEPQII

SEQ ID NO: 23092 - protein, 10 aa, Severe acute respiratory syndrome-related coronavirus
  REGION 1..10: note = Table B: HLA-DQA1*01-B1*05L
  source 1..10: note = Severe acute respiratory syndrome coronavirus 2
RNFYEPQIIT

SEQ ID NO: 23093 - protein, 11 aa, Severe acute respiratory syndrome-related coronavirus
  REGION 1..11: note = Table B: HLA-DQA1*01-B1*05L
  source 1..11: note = Severe acute respiratory syndrome coronavirus 2
NFYEPQIITTD

SEQ ID NO: 23094 - protein, 12 aa, Severe acute respiratory syndrome-related coronavirus
  REGION 1..12: note = Table B: HLA-DQA1*01-B1*05L
  source 1..12: note = Severe acute respiratory syndrome coronavirus 2
GIVNNTVYDPLQ

SEQ ID NO: 23095 - protein, 10 aa, Severe acute respiratory syndrome-related coronavirus
  REGION 1..10: note = Table B: HLA-DQA1*01-B1*05L HLA-DQA1*03:01-B1*03:02L
  source 1..10: note = Severe acute respiratory syndrome coronavirus 2
YDPLQPELDS

SEQ ID NO: 23096 - protein, 11 aa, Severe acute respiratory syndrome-related coronavirus
  REGION 1..11: note = Table B: HLA-DQA1*01-B1*05L HLA-DQA1*03:01-B1*03:02L HLA-DQA1*02:01-B1*03:03L
  source 1..11: note = Severe acute respiratory syndrome coronavirus 2
DPLQPELDSFK

SEQ ID NO: 23097 - protein, 11 aa, Severe acute respiratory syndrome-related coronavirus
  REGION 1..11: note = Table B: HLA-DQA1*01-B1*05L
  source 1..11: note = Severe acute respiratory syndrome coronavirus 2
QPELDSFKEEL

SEQ ID NO: 23098 - protein, 10 aa, Severe acute respiratory syndrome-related coronavirus
  REGION 1..10: note = Table B: HLA-DQA1*01-B1*05L
  source 1..10: note = Severe acute respiratory syndrome coronavirus 2
ELDSFKEELD

SEQ ID NO: 23099 - protein, 11 aa, Severe acute respiratory syndrome-related coronavirus
  REGION 1..11: note = Table B: HLA-DQA1*01-B1*05L
  source 1..11: note = Severe acute respiratory syndrome coronavirus 2
FKNHTSPDVDL

SEQ ID NO: 23100 - protein, 10 aa, Severe acute respiratory syndrome-related coronavirus
  REGION 1..10: note = Table B: HLA-DQA1*01-B1*05L
  source 1..10: note = Severe acute respiratory syndrome coronavirus 2
NHTSPDVDLG

SEQ ID NO: 23101 - protein, 12 aa, Severe acute respiratory syndrome-related coronavirus
  REGION 1..12: note = Table B: HLA-DQA1*01-B1*05L HLA-DQA1*05:01-B1*02:01L HLA-DQA1*03:01-B1*03:02L
  source 1..12: note = Severe acute respiratory syndrome coronavirus 2
TSPDVDLGDISG

SEQ ID NO: 23102 - protein, 12 aa, Severe acute respiratory syndrome-related coronavirus
  REGION 1..12: note = Table B: HLA-DQA1*01-B1*05L HLA-DQA1*05:01-B1*02:01L HLA-DPA1*02:01-B1*13:01L HLA-DPA1*03:01-B1*105:01L HLA-DRB1*15:03L
  source 1..12: note = Severe acute respiratory syndrome coronavirus 2
VVNIQKEIDRLN

SEQ ID NO: 23103 - protein, 11 aa, Severe acute respiratory syndrome-related coronavirus
  REGION 1..11: note = Table B: HLA-DQA1*01-B1*05L
  source 1..11: note = Severe acute respiratory syndrome coronavirus 2
KNLNESLIDLQ

SEQ ID NO: 23104 - protein, 11 aa, Severe acute respiratory syndrome-related coronavirus
  REGION 1..11: note = Table B: HLA-DQA1*01-B1*05L
  source 1..11: note = Severe acute respiratory syndrome coronavirus 2
NLNESLIDLQE

SEQ ID NO: 23105 - protein, 11 aa, Severe acute respiratory syndrome-related coronavirus
  REGION 1..11: note = Table B: HLA-DQA1*01-B1*05L
  source 1..11: note = Severe acute respiratory syndrome coronavirus 2
LNESLIDLQEL

SEQ ID NO: 23106 - protein, 11 aa, Severe acute respiratory syndrome-related coronavirus
  REGION 1..11: note = Table B: HLA-DQA1*01-B1*05L HLA-DQA1*05:01-B1*02:01L
  source 1..11: note = Severe acute respiratory syndrome coronavirus 2
NESLIDLQELG

SEQ ID NO: 23107 - protein, 10 aa, Severe acute respiratory syndrome-related coronavirus
  REGION 1..10: note = Table B: HLA-DQA1*01-B1*05L
  source 1..10: note = Severe acute respiratory syndrome coronavirus 2
KFDEDDSEPV

SEQ ID NO: 23108 - protein, 11 aa, Severe acute respiratory syndrome-related coronavirus
  REGION 1..11: note = Table B: HLA-DQA1*01-B1*05L
  source 1..11: note = Severe acute respiratory syndrome coronavirus 2
KNPLLYDANYF

SEQ ID NO: 23109 - protein, 12 aa, Severe acute respiratory syndrome-related coronavirus
  REGION 1..12: note = Table B: HLA-DQA1*01-B1*05L
  source 1..12: note = Severe acute respiratory syndrome coronavirus 2
DYCIPYNSVTSS

SEQ ID NO: 23110 - protein, 11 aa, Severe acute respiratory syndrome-related coronavirus
  REGION 1..11: note = Table B: HLA-DQA1*01-B1*05L HLA-DQA1*05:01-B1*02:01L HLA-DQA1*03:01-B1*03:02L
  source 1..11: note = Severe acute respiratory syndrome coronavirus 2
SPISEHDYQIG

SEQ ID NO: 23111 - protein, 10 aa, Severe acute respiratory syndrome-related coronavirus
  REGION 1..10: note = Table B: HLA-DQA1*01-B1*05L
  source 1..10: note = Severe acute respiratory syndrome coronavirus 2
QIGGYTEKWE

SEQ ID NO: 23112 - protein, 11 aa, Severe acute respiratory syndrome-related coronavirus
  REGION 1..11: note = Table B: HLA-DQA1*01-B1*05L HLA-DQA1*02:01-B1*03:03L
  source 1..11: note = Severe acute respiratory syndrome coronavirus 2
YTEKWESGVKD

SEQ ID NO: 23113 - protein, 10 aa, Severe acute respiratory syndrome-related coronavirus
  REGION 1..10: note = Table B: HLA-DQA1*01-B1*05L
  source 1..10: note = Severe acute respiratory syndrome coronavirus 2
HSYFTSDYYQ

SEQ ID NO: 23114 - protein, 10 aa, Severe acute respiratory syndrome-related coronavirus
  REGION 1..10: note = Table B: HLA-DQA1*01-B1*05L
  source 1..10: note = Severe acute respiratory syndrome coronavirus 2
EPIYDEPTTT

SEQ ID NO: 23115 - protein, 12 aa, Severe acute respiratory syndrome-related coronavirus
  REGION 1..12: note = Table B: HLA-DQA1*01-B1*05L HLA-DRB1*16:01L HLA-DQA1*01:03-B1*06:01L HLA-DQA1*02:01-B1*03:03L
  source 1..12: note = Severe acute respiratory syndrome coronavirus 2
ADSNGTITVEEL

SEQ ID NO: 23116 - protein, 11 aa, Severe acute respiratory syndrome-related coronavirus
  REGION 1..11: note = Table B: HLA-DQA1*01-B1*05L
  source 1..11: note = Severe acute respiratory syndrome coronavirus 2
KLLEQWNLVIG

SEQ ID NO: 23117 - protein, 10 aa, Severe acute respiratory syndrome-related coronavirus
  REGION 1..10: note = Table B: HLA-DQA1*01-B1*05L HLA-DQA1*05:01-B1*02:01L HLA-DQA1*03:01-B1*03:02L
  source 1..10: note = Severe acute respiratory syndrome coronavirus 2
SMWSFNPETN

SEQ ID NO: 23118 - protein, 11 aa, Severe acute respiratory syndrome-related coronavirus
  REGION 1..11: note = Table B: HLA-DQA1*01-B1*05L HLA-DQA1*05:01-B1*02:01L HLA-DPA1*03:01-B1*105:01L HLA-DQA1*01:03-B1*06:01L
  source 1..11: note = Severe acute respiratory syndrome coronavirus 2
ILTRPLLESEL

SEQ ID NO: 23119 - protein, 10 aa, Severe acute respiratory syndrome-related coronavirus
  REGION 1..10: note = Table B: HLA-DQA1*01-B1*05L HLA-DQA1*05:01-B1*02:01L HLA-DQA1*03:01-B1*03:02L
  source 1..10: note = Severe acute respiratory syndrome coronavirus 2
DHSSSSDNIA

SEQ ID NO: 23120 - protein, 11 aa, Severe acute respiratory syndrome-related coronavirus
  REGION 1..11: note = Table B: HLA-DQA1*01-B1*05L HLA-DPA1*01:03-B1*04:02L HLA-DPA1*02:01-B1*13:01L HLA-DPA1*01:02-B1*04:01L HLA-DQA1*01:03-B1*06:01L HLA-DRB1*15:03L
  source 1..11: note = Severe acute respiratory syndrome coronavirus 2
TFKVSIWNLDY

SEQ ID NO: 23121 - protein, 11 aa, Severe acute respiratory syndrome-related coronavirus
  REGION 1..11: note = Table B: HLA-DQA1*01-B1*05L
  source 1..11: note = Severe acute respiratory syndrome coronavirus 2
VSIWNLDYIIN

SEQ ID NO: 23122 - protein, 11 aa, Severe acute respiratory syndrome-related coronavirus
  REGION 1..11: note = Table B: HLA-DQA1*01-B1*05L
  source 1..11: note = Severe acute respiratory syndrome coronavirus 2
NLDYIINLIIK

SEQ ID NO: 23123 - protein, 11 aa, Severe acute respiratory syndrome-related coronavirus
  REGION 1..11: note = Table B: HLA-DQA1*01-B1*05L HLA-DQA1*03:01-B1*03:02L
  source 1..11: note = Severe acute respiratory syndrome coronavirus 2
NKYSQLDEEQP

SEQ ID NO: 23124 - protein, 11 aa, Severe acute respiratory syndrome-related coronavirus
  REGION 1..11: note = Table B: HLA-DQA1*01-B1*05L
  source 1..11: note = Severe acute respiratory syndrome coronavirus 2
KYSQLDEEQPM

SEQ ID NO: 23125 - protein, 11 aa, Severe acute respiratory syndrome-related coronavirus
  REGION 1..11: note = Table B: HLA-DQA1*01-B1*05L HLA-DQA1*05:01-B1*02:01L
  source 1..11: note = Severe acute respiratory syndrome coronavirus 2
QLDEEQPMEID

SEQ ID NO: 23126 - protein, 10 aa, Severe acute respiratory syndrome-related coronavirus
  REGION 1..10: note = Table B: HLA-DQA1*01-B1*05L HLA-DQA1*03:01-B1*03:02L
  source 1..10: note = Severe acute respiratory syndrome coronavirus 2
TYEGNSPFHP

SEQ ID NO: 23127 - protein, 12 aa, Severe acute respiratory syndrome-related coronavirus
  REGION 1..12: note = Table B: HLA-DQA1*01-B1*05L HLA-DPA1*03:01-B1*105:01L HLA-DRB1*15:03L
  source 1..12: note = Severe acute respiratory syndrome coronavirus 2
IIFWFSLELQDH

SEQ ID NO: 23128 - protein, 11 aa, Severe acute respiratory syndrome-related coronavirus
  REGION 1..11: note = Table B: HLA-DQA1*01-B1*05L
  source 1..11: note = Severe acute respiratory syndrome coronavirus 2
TQHQPYVVDDP

SEQ ID NO: 23129 - protein, 11 aa, Severe acute respiratory syndrome-related coronavirus
  REGION 1..11: note = Table B: HLA-DQA1*01-B1*05L
  source 1..11: note = Severe acute respiratory syndrome coronavirus 2
QPYVVDDPCPI

SEQ ID NO: 23130 - protein, 10 aa, Severe acute respiratory syndrome-related coronavirus
  REGION 1..10: note = Table B: HLA-DQA1*01-B1*05L
  source 1..10: note = Severe acute respiratory syndrome coronavirus 2
SPIQYIDIGN

SEQ ID NO: 23131 - protein, 10 aa, Severe acute respiratory syndrome-related coronavirus
  REGION 1..10: note = Table B: HLA-DQA1*01-B1*05L
  source 1..10: note = Severe acute respiratory syndrome coronavirus 2
IQYIDIGNYT

SEQ ID NO: 23132 - protein, 11 aa, Severe acute respiratory syndrome-related coronavirus
  REGION 1..11: note = Table B: HLA-DQA1*01-B1*05L
  source 1..11: note = Severe acute respiratory syndrome coronavirus 2
VRCSFYEDFLE

SEQ ID NO: 23133 - protein, 10 aa, Severe acute respiratory syndrome-related coronavirus
  REGION 1..10: note = Table B: HLA-DQA1*01-B1*05L HLA-DPA1*03:01-B1*105:01L
  source 1..10: note = Severe acute respiratory syndrome coronavirus 2
DFLEYHDVRV

SEQ ID NO: 23134 - protein, 10 aa, Severe acute respiratory syndrome-related coronavirus
  REGION 1..10: note = Table B: HLA-DQA1*01-B1*05L HLA-DPA1*03:01-B1*105:01L HLA-DQA1*03:01-B1*03:02L HLA-DPA1*01:02-B1*04:01L HLA-DQA1*01:03-B1*06:01L HLA-DQA1*02:01-B1*03:03L
  source 1..10: note = Severe acute respiratory syndrome coronavirus 2
EYHDVRVVLD

SEQ ID NO: 23135 - protein, 11 aa, Severe acute respiratory syndrome-related coronavirus
  REGION 1..11: note = Table B: HLA-DQA1*01-B1*05L HLA-DQA1*05:01-B1*02:01L
  source 1..11: note = Severe acute respiratory syndrome coronavirus 2
NTNSSPDDQIG

SEQ ID NO: 23136 - protein, 12 aa, Severe acute respiratory syndrome-related coronavirus
  REGION 1..12: note = Table B: HLA-DQA1*01-B1*05L HLA-DQA1*05:01-B1*02:01L
  source 1..12: note = Severe acute respiratory syndrome coronavirus 2
EGALNTPKDHIG

SEQ ID NO: 23137 - protein, 11 aa, Severe acute respiratory syndrome-related coronavirus
  REGION 1..11: note = Table B: HLA-DQA1*01-B1*05L
  source 1..11: note = Severe acute respiratory syndrome coronavirus 2
TATKAYNVTQA

SEQ ID NO: 23138 - protein, 10 aa, Severe acute respiratory syndrome-related coronavirus
  REGION 1..10: note = Table B: HLA-DQA1*01-B1*05L HLA-DQA1*05:01-B1*02:01L HLA-DQA1*03:01-B1*03:02L HLA-DQA1*01:03-B1*06:01L HLA-DQA1*02:01-B1*03:03L
  source 1..10: note = Severe acute respiratory syndrome coronavirus 2
GNFGDQELIR

SEQ ID NO: 23139 - protein, 11 aa, Severe acute respiratory syndrome-related coronavirus
  REGION 1..11: note = Table B: HLA-DQA1*01-B1*05L
  source 1..11: note = Severe acute respiratory syndrome coronavirus 2
DKDPNFKDQVI

SEQ ID NO: 23140 - protein, 11 aa, Severe acute respiratory syndrome-related coronavirus
  REGION 1..11: note = Table B: HLA-DQA1*01-B1*05L HLA-DQA1*03:01-B1*03:02L
  source 1..11: note = Severe acute respiratory syndrome coronavirus 2
DAYKTFPPTEP

SEQ ID NO: 23141 - protein, 10 aa, Severe acute respiratory syndrome-related coronavirus
  REGION 1..10: note = Table B: HLA-DQA1*01-B1*05L
  source 1..10: note = Severe acute respiratory syndrome coronavirus 2
LPAADLDDFS

SEQ ID NO: 23142 - protein, 11 aa, Severe acute respiratory syndrome-related coronavirus
  REGION 1..11: note = Table B: HLA-DQA1*01-B1*05L HLA-DQA1*03:01-B1*03:02L
  source 1..11: note = Severe acute respiratory syndrome coronavirus 2
DLDDFSKQLQQ

SEQ ID NO: 23143 - protein, 14 aa, Severe acute respiratory syndrome-related coronavirus
  REGION 1..14: note = Table B: HLA-DQA1*05:05-B1*03:19L HLA-DPA1*03:01-B1*105:01L
  source 1..14: note = Severe acute respiratory syndrome coronavirus 2
GFGDSVEEVLSEAR

SEQ ID NO: 23144 - protein, 10 aa, Severe acute respiratory syndrome-related coronavirus
  REGION 1..10: note = Table B: HLA-DQA1*05:05-B1*03:19L HLA-DQA1*05:01-B1*02:01L
  source 1..10: note = Severe acute respiratory syndrome coronavirus 2
LGDELGTDPY

SEQ ID NO: 23145 - protein, 14 aa, Severe acute respiratory syndrome-related coronavirus
  REGION 1..14: note = Table B: HLA-DQA1*05:05-B1*03:19L HLA-DQA1*05:05-B1*03:01L
  source 1..14: note = Severe acute respiratory syndrome coronavirus 2
YVDNNFCGPDGYPL

SEQ ID NO: 23146 - protein, 10 aa, Severe acute respiratory syndrome-related coronavirus
  REGION 1..10: note = Table B: HLA-DQA1*05:05-B1*03:19L
  source 1..10: note = Severe acute respiratory syndrome coronavirus 2
LDFIDTKRGV

SEQ ID NO: 23147 - protein, 11 aa, Severe acute respiratory syndrome-related coronavirus
  REGION 1..11: note = Table B: HLA-DQA1*05:05-B1*03:19L
  source 1..11: note = Severe acute respiratory syndrome coronavirus 2
VFPLNSIIKTI

SEQ ID NO: 23148 - protein, 10 aa, Severe acute respiratory syndrome-related coronavirus
  REGION 1..10: note = Table B: HLA-DQA1*05:05-B1*03:19L
  source 1..10: note = Severe acute respiratory syndrome coronavirus 2
GDFVKATCEF

SEQ ID NO: 23149 - protein, 10 aa, Severe acute respiratory syndrome-related coronavirus
  REGION 1..10: note = Table B: HLA-DQA1*05:05-B1*03:19L
  source 1..10: note = Severe acute respiratory syndrome coronavirus 2
TKEGATTCGY

SEQ ID NO: 23150 - protein, 15 aa, Severe acute respiratory syndrome-related coronavirus
  REGION 1..15: note = Table B: HLA-DQA1*05:05-B1*03:19L
  source 1..15: note = Severe acute respiratory syndrome coronavirus 2
GATTCGYLPQNAVVK

SEQ ID NO: 23151 - protein, 11 aa, Severe acute respiratory syndrome-related coronavirus
  REGION 1..11: note = Table B: HLA-DQA1*05:05-B1*03:19L
  source 1..11: note = Severe acute respiratory syndrome coronavirus 2
IVGDFKLNEEI

SEQ ID NO: 23152 - protein, 15 aa, Severe acute respiratory syndrome-related coronavirus
  REGION 1..15: note = Table B: HLA-DQA1*05:05-B1*03:19L
  source 1..15: note = Severe acute respiratory syndrome coronavirus 2
NFKVTKGKAKKGAWN

SEQ ID NO: 23153 - protein, 10 aa, Severe acute respiratory syndrome-related coronavirus
  REGION 1..10: note = Table B: HLA-DQA1*05:05-B1*03:19L
  source 1..10: note = Severe acute respiratory syndrome coronavirus 2
AWNIGEQKSI

SEQ ID NO: 23154 - protein, 13 aa, Severe acute respiratory syndrome-related coronavirus
  REGION 1..13: note = Table B: HLA-DQA1*05:05-B1*03:19L
  source 1..13: note = Severe acute respiratory syndrome coronavirus 2
FISTCACEIVGGQ

SEQ ID NO: 23155 - protein, 12 aa, Severe acute respiratory syndrome-related coronavirus
  REGION 1..12: note = Table B: HLA-DQA1*05:05-B1*03:19L
  source 1..12: note = Severe acute respiratory syndrome coronavirus 2
IGGAKLKALNLG

SEQ ID NO: 23156 - protein, 14 aa, Severe acute respiratory syndrome-related coronavirus
  REGION 1..14: note = Table B: HLA-DQA1*05:05-B1*03:19L HLA-DPA1*03:01-B1*105:01L HLA-DRB1*15:03L
  source 1..14: note = Severe acute respiratory syndrome coronavirus 2
LKALNLGETFVTHS

SEQ ID NO: 23157 - protein, 11 aa, Severe acute respiratory syndrome-related coronavirus
  REGION 1..11: note = Table B: HLA-DQA1*05:05-B1*03:19L
  source 1..11: note = Severe acute respiratory syndrome coronavirus 2
LLMPLKAPKEI

SEQ ID NO: 23158 - protein, 11 aa, Severe acute respiratory syndrome-related coronavirus
  REGION 1..11: note = Table B: HLA-DQA1*05:05-B1*03:19L
  source 1..11: note = Severe acute respiratory syndrome coronavirus 2
PVSELLTPLGI

SEQ ID NO: 23159 - protein, 11 aa, Severe acute respiratory syndrome-related coronavirus
  REGION 1..11: note = Table B: HLA-DQA1*05:05-B1*03:19L HLA-DQA1*01:03-B1*06:01L HLA-DQA1*02:01-B1*03:03L
  source 1..11: note = Severe acute respiratory syndrome coronavirus 2
LTPLGIDLDEW

SEQ ID NO: 23160 - protein, 10 aa, Severe acute respiratory syndrome-related coronavirus
  REGION 1..10: note = Table B: HLA-DQA1*05:05-B1*03:19L HLA-DQA1*05:01-B1*02:01L
  source 1..10: note = Severe acute respiratory syndrome coronavirus 2
QYEYGTEDDY

SEQ ID NO: 23161 - protein, 11 aa, Severe acute respiratory syndrome-related coronavirus
  REGION 1..11: note = Table B: HLA-DQA1*05:05-B1*03:19L HLA-DQA1*05:01-B1*02:01L
  source 1..11: note = Severe acute respiratory syndrome coronavirus 2
LQPEEEQEEDW

SEQ ID NO: 23162 - protein, 13 aa, Severe acute respiratory syndrome-related coronavirus
  REGION 1..13: note = Table B: HLA-DQA1*05:05-B1*03:19L HLA-DRB1*16:01L
  source 1..13: note = Severe acute respiratory syndrome coronavirus 2
DDDSQQTVGQQDG

SEQ ID NO: 23163 - protein, 10 aa, Severe acute respiratory syndrome-related coronavirus
  REGION 1..10: note = Table B: HLA-DQA1*05:05-B1*03:19L
  source 1..10: note = Severe acute respiratory syndrome coronavirus 2
GSEDNQTTTI

SEQ ID NO: 23164 - protein, 12 aa, Severe acute respiratory syndrome-related coronavirus
  REGION 1..12: note = Table B: HLA-DQA1*05:05-B1*03:19L
  source 1..12: note = Severe acute respiratory syndrome coronavirus 2
SEDNQTTTIQTI

SEQ ID NO: 23165 - protein, 11 aa, Severe acute respiratory syndrome-related coronavirus
  REGION 1..11: note = Table B: HLA-DQA1*05:05-B1*03:19L HLA-DQA1*03:01-B1*03:02L
  source 1..11: note = Severe acute respiratory syndrome coronavirus 2
VEVQPQLEMEL

SEQ ID NO: 23166 - protein, 10 aa, Severe acute respiratory syndrome-related coronavirus
  REGION 1..10: note = Table B: HLA-DQA1*05:05-B1*03:19L HLA-DQA1*02:01-B1*03:03L HLA-DRB1*15:03L
  source 1..10: note = Severe acute respiratory syndrome coronavirus 2
YLKLTDNVYI

SEQ ID NO: 23167 - protein, 10 aa, Severe acute respiratory syndrome-related coronavirus
  REGION 1..10: note = Table B: HLA-DQA1*05:05-B1*03:19L
  source 1..10: note = Severe acute respiratory syndrome coronavirus 2
ADIVEEAKKV

SEQ ID NO: 23168 - protein, 10 aa, Severe acute respiratory syndrome-related coronavirus
  REGION 1..10: note = Table B: HLA-DQA1*05:05-B1*03:19L
  source 1..10: note = Severe acute respiratory syndrome coronavirus 2
CVDTVRTNVY

SEQ ID NO: 23169 - protein, 10 aa, Severe acute respiratory syndrome-related coronavirus
  REGION 1..10: note = Table B: HLA-DQA1*05:05-B1*03:19L HLA-DPA1*01:03-B1*104:01L
  source 1..10: note = Severe acute respiratory syndrome coronavirus 2
FLTENLLLYI

SEQ ID NO: 23170 - protein, 10 aa, Severe acute respiratory syndrome-related coronavirus
  REGION 1..10: note = Table B: HLA-DQA1*05:05-B1*03:19L HLA-DPA1*01:03-B1*104:01L
  source 1..10: note = Severe acute respiratory syndrome coronavirus 2
TENLLLYIDI

SEQ ID NO: 23171 - protein, 10 aa, Severe acute respiratory syndrome-related coronavirus
  REGION 1..10: note = Table B: HLA-DQA1*05:05-B1*03:19L
  source 1..10: note = Severe acute respiratory syndrome coronavirus 2
QEGVLTAVVI

SEQ ID NO: 23172 - protein, 11 aa, Severe acute respiratory syndrome-related coronavirus
  REGION 1..11: note = Table B: HLA-DQA1*05:05-B1*03:19L HLA-DQA1*05:01-B1*02:01L
  source 1..11: note = Severe acute respiratory syndrome coronavirus 2
KVPTDNYITTY

SEQ ID NO: 23173 - protein, 10 aa, Severe acute respiratory syndrome-related coronavirus
  REGION 1..10: note = Table B: HLA-DQA1*05:05-B1*03:19L
  source 1..10: note = Severe acute respiratory syndrome coronavirus 2
NDLNETLVTM

SEQ ID NO: 23174 - protein, 12 aa, Severe acute respiratory syndrome-related coronavirus
  REGION 1..12: note = Table B: HLA-DQA1*05:05-B1*03:19L HLA-DRB1*16:01L
  source 1..12: note = Severe acute respiratory syndrome coronavirus 2
IEFLKRGDKSVY

SEQ ID NO: 23175 - protein, 10 aa, Severe acute respiratory syndrome-related coronavirus
  REGION 1..10: note = Table B: HLA-DQA1*05:05-B1*03:19L HLA-DPA1*01:03-B1*104:01L
  source 1..10: note = Severe acute respiratory syndrome coronavirus 2
VDNINLHTQV

SEQ ID NO: 23176 - protein, 12 aa, Severe acute respiratory syndrome-related coronavirus
  REGION 1..12: note = Table B: HLA-DQA1*05:05-B1*03:19L HLA-DQA1*05:01-B1*02:01L HLA-DRB1*12:01L HLA-DRB1*15:03L
  source 1..12: note = Severe acute respiratory syndrome coronavirus 2
VVDMSMTYGQQF

SEQ ID NO: 23177 - protein, 10 aa, Severe acute respiratory syndrome-related coronavirus
  REGION 1..10: note = Table B: HLA-DQA1*05:05-B1*03:19M HLA-DPA1*01:03-B1*104:01L
  source 1..10: note = Severe acute respiratory syndrome coronavirus 2
GEAANFCALI

SEQ ID NO: 23178 - protein, 10 aa, Severe acute respiratory syndrome-related coronavirus
  REGION 1..10: note = Table B: HLA-DQA1*05:05-B1*03:19L HLA-DPA1*01:03-B1*104:01L
  source 1..10: note = Severe acute respiratory syndrome coronavirus 2
YKENSYTTTI

SEQ ID NO: 23179 - protein, 14 aa, Severe acute respiratory syndrome-related coronavirus
  REGION 1..14: note = Table B: HLA-DQA1*05:05-B1*03:19L HLA-DRB1*12:01L HLA-DRB1*04:08L
  source 1..14: note = Severe acute respiratory syndrome coronavirus 2
LDGVVCTEIDPKLD

SEQ ID NO: 23180 - protein, 10 aa, Severe acute respiratory syndrome-related coronavirus
  REGION 1..10: note = Table B: HLA-DQA1*05:05-B1*03:19L HLA-DRB1*16:01L HLA-DQA1*01:03-B1*06:01L HLA-DQA1*02:01-B1*03:03L
  source 1..10: note = Severe acute respiratory syndrome coronavirus 2
IDYKHYTPSF

SEQ ID NO: 23181 - protein, 12 aa, Severe acute respiratory syndrome-related coronavirus
  REGION 1..12: note = Table B: HLA-DQA1*05:05-B1*03:19L
  source 1..12: note = Severe acute respiratory syndrome coronavirus 2
ATNKATYKPNTW

SEQ ID NO: 23182 - protein, 15 aa, Severe acute respiratory syndrome-related coronavirus
  REGION 1..15: note = Table B: HLA-DQA1*05:05-B1*03:19L
  source 1..15: note = Severe acute respiratory syndrome coronavirus 2
GMDNLACEDLKPVSE

SEQ ID NO: 23183 - protein, 11 aa, Severe acute respiratory syndrome-related coronavirus
  REGION 1..11: note = Table B: HLA-DQA1*05:05-B1*03:19L
  source 1..11: note = Severe acute respiratory syndrome coronavirus 2
ILKPANNSLKI

SEQ ID NO: 23184 - protein, 10 aa, Severe acute respiratory syndrome-related coronavirus
  REGION 1..10: note = Table B: HLA-DQA1*05:05-B1*03:19L
  source 1..10: note = Severe acute respiratory syndrome coronavirus 2
PNELSRVLGL

SEQ ID NO: 23185 - protein, 10 aa, Severe acute respiratory syndrome-related coronavirus
  REGION 1..10: note = Table B: HLA-DQA1*05:05-B1*03:19L
  source 1..10: note = Severe acute respiratory syndrome coronavirus 2
KFCLEASFNY

SEQ ID NO: 23186 - protein, 15 aa, Severe acute respiratory syndrome-related coronavirus
  REGION 1..15: note = Table B: HLA-DQA1*05:05-B1*03:19L
  source 1..15: note = Severe acute respiratory syndrome coronavirus 2
TGSIPCSVCLSGLDS

SEQ ID NO: 23187 - protein, 10 aa, Severe acute respiratory syndrome-related coronavirus
  REGION 1..10: note = Table B: HLA-DQA1*05:05-B1*03:19L HLA-DPA1*01:03-B1*104:01L
  source 1..10: note = Severe acute respiratory syndrome coronavirus 2
LDTYPSLETI

SEQ ID NO: 23188 - protein, 10 aa, Severe acute respiratory syndrome-related coronavirus
  REGION 1..10: note = Table B: HLA-DQA1*05:05-B1*03:19L HLA-DQA1*05:05-B1*03:116L HLA-DPA1*02:01-B1*13:01L HLA-DQA1*01:03-B1*06:01L HLA-DRB1*15:03L
  source 1..10: note = Severe acute respiratory syndrome coronavirus 2
TYPSLETIQI

SEQ ID NO: 23189 - protein, 14 aa, Severe acute respiratory syndrome-related coronavirus
  REGION 1..14: note = Table B: HLA-DQA1*05:05-B1*03:19L
  source 1..14: note = Severe acute respiratory syndrome coronavirus 2
PSLETIQITISSFK

SEQ ID NO: 23190 - protein, 10 aa, Severe acute respiratory syndrome-related coronavirus
  REGION 1..10: note = Table B: HLA-DQA1*05:05-B1*03:19L
  source 1..10: note = Severe acute respiratory syndrome coronavirus 2
LVAEWFLAYI

SEQ ID NO: 23191 - protein, 10 aa, Severe acute respiratory syndrome-related coronavirus
  REGION 1..10: note = Table B: HLA-DQA1*05:05-B1*03:19L
  source 1..10: note = Severe acute respiratory syndrome coronavirus 2
AEWFLAYILF

SEQ ID NO: 23192 - protein, 10 aa, Severe acute respiratory syndrome-related coronavirus
  REGION 1..10: note = Table B: HLA-DQA1*05:05-B1*03:19L
  source 1..10: note = Severe acute respiratory syndrome coronavirus 2
VECTTIVNGV

SEQ ID NO: 23193 - protein, 15 aa, Severe acute respiratory syndrome-related coronavirus
  REGION 1..15: note = Table B: HLA-DQA1*05:05-B1*03:19L HLA-DPA1*03:01-B1*105:01L
  source 1..15: note = Severe acute respiratory syndrome coronavirus 2
DTFCAGSTFISDEVA

SEQ ID NO: 23194 - protein, 13 aa, Severe acute respiratory syndrome-related coronavirus
  REGION 1..13: note = Table B: HLA-DQA1*05:05-B1*03:19L HLA-DRB1*08:02L
  source 1..13: note = Severe acute respiratory syndrome coronavirus 2
SHFVNLDNLRANN

SEQ ID NO: 23195 - protein, 13 aa, Severe acute respiratory syndrome-related coronavirus
  REGION 1..13: note = Table B: HLA-DQA1*05:05-B1*03:19L HLA-DPA1*01:02-B1*04:01L
  source 1..13: note = Severe acute respiratory syndrome coronavirus 2
VIVFDGKSKCEES

SEQ ID NO: 23196 - protein, 16 aa, Severe acute respiratory syndrome-related coronavirus
  REGION 1..16: note = Table B: HLA-DQA1*05:05-B1*03:19L
  source 1..16: note = Severe acute respiratory syndrome coronavirus 2
VVNVVTTKIALKGGKI

SEQ ID NO: 23197 - protein, 10 aa, Severe acute respiratory syndrome-related coronavirus
  REGION 1..10: note = Table B: HLA-DQA1*05:05-B1*03:19L
  source 1..10: note = Severe acute respiratory syndrome coronavirus 2
SSEIIGYKAI

SEQ ID NO: 23198 - protein, 11 aa, Severe acute respiratory syndrome-related coronavirus
  REGION 1..11: note = Table B: HLA-DQA1*05:05-B1*03:19L HLA-DQA1*05:01-B1*02:01L HLA-DPA1*03:01-B1*105:01L HLA-DQA1*01:03-B1*06:01L
  source 1..11: note = Severe acute respiratory syndrome coronavirus 2
FANKHADFDTW

SEQ ID NO: 23199 - protein, 10 aa, Severe acute respiratory syndrome-related coronavirus
  REGION 1..10: note = Table B: HLA-DQA1*05:05-B1*03:19L
  source 1..10: note = Severe acute respiratory syndrome coronavirus 2
YTNDKACPLI

SEQ ID NO: 23200 - protein, 10 aa, Severe acute respiratory syndrome-related coronavirus
  REGION 1..10: note = Table B: HLA-DQA1*05:05-B1*03:19L
  source 1..10: note = Severe acute respiratory syndrome coronavirus 2
GDFLHFLPRV

SEQ ID NO: 23201 - protein, 10 aa, Severe acute respiratory syndrome-related coronavirus
  REGION 1..10: note = Table B: HLA-DQA1*05:05-B1*03:19L
  source 1..10: note = Severe acute respiratory syndrome coronavirus 2
CYTPSKLIEY

SEQ ID NO: 23202 - protein, 10 aa, Severe acute respiratory syndrome-related coronavirus
  REGION 1..10: note = Table B: HLA-DQA1*05:05-B1*03:19L HLA-DQA1*05:01-B1*02:01L
  source 1..10: note = Severe acute respiratory syndrome coronavirus 2
TNVLEGSVAY

SEQ ID NO: 23203 - protein, 12 aa, Severe acute respiratory syndrome-related coronavirus
  REGION 1..12: note = Table B: HLA-DQA1*05:05-B1*03:19L HLA-DQA1*02:01-B1*03:03L
  source 1..12: note = Severe acute respiratory syndrome coronavirus 2
EAGVCVSTSGRW

SEQ ID NO: 23204 - protein, 10 aa, Severe acute respiratory syndrome-related coronavirus
  REGION 1..10: note = Table B: HLA-DQA1*05:05-B1*03:19L HLA-DQA1*02:01-B1*03:03L
  source 1..10: note = Severe acute respiratory syndrome coronavirus 2
SGRWVLNNDY

SEQ ID NO: 23205 - protein, 10 aa, Severe acute respiratory syndrome-related coronavirus
  REGION 1..10: note = Table B: HLA-DQA1*05:05-B1*03:19L HLA-DPA1*01:03-B1*104:01L
  source 1..10: note = Severe acute respiratory syndrome coronavirus 2
NDYYRSLPGV

SEQ ID NO: 23206 - protein, 15 aa, Severe acute respiratory syndrome-related coronavirus
  REGION 1..15: note = Table B: HLA-DQA1*05:05-B1*03:19L
  source 1..15: note = Severe acute respiratory syndrome coronavirus 2
LPGVFCGVDAVNLLT

SEQ ID NO: 23207 - protein, 16 aa, Severe acute respiratory syndrome-related coronavirus
  REGION 1..16: note = Table B: HLA-DQA1*05:05-B1*03:19L
  source 1..16: note = Severe acute respiratory syndrome coronavirus 2
TSYREAACCHLAKALN

SEQ ID NO: 23208 - protein, 17 aa, Severe acute respiratory syndrome-related coronavirus
  REGION 1..17: note = Table B: HLA-DQA1*05:05-B1*03:19L
  source 1..17: note = Severe acute respiratory syndrome coronavirus 2
DLLIRKSNHNFLVQAGN

SEQ ID NO: 23209 - protein, 12 aa, Severe acute respiratory syndrome-related coronavirus
  REGION 1..12: note = Table B: HLA-DQA1*05:05-B1*03:19L HLA-DQA1*05:05-B1*03:01L
  source 1..12: note = Severe acute respiratory syndrome coronavirus 2
GSFLNGSCGSVG

SEQ ID NO: 23210 - protein, 13 aa, Severe acute respiratory syndrome-related coronavirus
  REGION 1..13: note = Table B: HLA-DQA1*05:05-B1*03:19L HLA-DQA1*01:03-B1*06:01L
  source 1..13: note = Severe acute respiratory syndrome coronavirus 2
SFLNGSCGSVGFN

SEQ ID NO: 23211 - protein, 10 aa, Severe acute respiratory syndrome-related coronavirus
  REGION 1..10: note = Table B: HLA-DQA1*05:05-B1*03:19L
  source 1..10: note = Severe acute respiratory syndrome coronavirus 2
IDYDCVSFCY

SEQ ID NO: 23212 - protein, 13 aa, Severe acute respiratory syndrome-related coronavirus
  REGION 1..13: note = Table B: HLA-DQA1*05:05-B1*03:19L
  source 1..13: note = Severe acute respiratory syndrome coronavirus 2
PTGVHAGTDLEGN

SEQ ID NO: 23213 - protein, 15 aa, Severe acute respiratory syndrome-related coronavirus
  REGION 1..15: note = Table B: HLA-DQA1*05:05-B1*03:19L
  source 1..15: note = Severe acute respiratory syndrome coronavirus 2
EGNFYGPFVDRQTAQ

SEQ ID NO: 23214 - protein, 11 aa, Severe acute respiratory syndrome-related coronavirus
  REGION 1..11: note = Table B: HLA-DQA1*05:05-B1*03:19L HLA-DRB1*15:03L
  source 1..11: note = Severe acute respiratory syndrome coronavirus 2
FTTTLNDFNLV

SEQ ID NO: 23215 - protein, 10 aa, Severe acute respiratory syndrome-related coronavirus
  REGION 1..10: note = Table B: HLA-DQA1*05:05-B1*03:19L
  source 1..10: note = Severe acute respiratory syndrome coronavirus 2
FNLVAMKYNY

SEQ ID NO: 23216 - protein, 11 aa, Severe acute respiratory syndrome-related coronavirus
  REGION 1..11: note = Table B: HLA-DQA1*05:05-B1*03:19L
  source 1..11: note = Severe acute respiratory syndrome coronavirus 2
YNYEPLTQDHV

SEQ ID NO: 23217 - protein, 15 aa, Severe acute respiratory syndrome-related coronavirus
  REGION 1..15: note = Table B: HLA-DQA1*05:05-B1*03:19L HLA-DRB1*04:08L
  source 1..15: note = Severe acute respiratory syndrome coronavirus 2
VVRQCSGVTFQSAVK

SEQ ID NO: 23218 - protein, 10 aa, Severe acute respiratory syndrome-related coronavirus
  REGION 1..10: note = Table B: HLA-DQA1*05:05-B1*03:19L HLA-DPA1*01:03-B1*104:01L HLA-DQA1*01:03-B1*06:01L
  source 1..10: note = Severe acute respiratory syndrome coronavirus 2
GTHHWLLLTI

SEQ ID NO: 23219 - protein, 11 aa, Severe acute respiratory syndrome-related coronavirus
  REGION 1..11: note = Table B: HLA-DQA1*05:05-B1*03:19L HLA-DPA1*02:01-B1*13:01L HLA-DPA1*01:03-B1*104:01L HLA-DQA1*01:03-B1*06:01L
  source 1..11: note = Severe acute respiratory syndrome coronavirus 2
VYYGNALDQAI

SEQ ID NO: 23220 - protein, 13 aa, Severe acute respiratory syndrome-related coronavirus
  REGION 1..13: note = Table B: HLA-DQA1*05:05-B1*03:19L
  source 1..13: note = Severe acute respiratory syndrome coronavirus 2
NSQGLLPPKNSID

SEQ ID NO: 23221 - protein, 12 aa, Severe acute respiratory syndrome-related coronavirus
  REGION 1..12: note = Table B: HLA-DQA1*05:05-B1*03:19L HLA-DQA1*01:03-B1*06:01L
  source 1..12: note = Severe acute respiratory syndrome coronavirus 2
GLLPPKNSIDAF

SEQ ID NO: 23222 - protein, 10 aa, Severe acute respiratory syndrome-related coronavirus
  REGION 1..10: note = Table B: HLA-DQA1*05:05-B1*03:19L
  source 1..10: note = Severe acute respiratory syndrome coronavirus 2
LDNRATLQAI

SEQ ID NO: 23223 - protein, 14 aa, Severe acute respiratory syndrome-related coronavirus
  REGION 1..14: note = Table B: HLA-DQA1*05:05-B1*03:19L
  source 1..14: note = Severe acute respiratory syndrome coronavirus 2
SEFDRDAAMQRKLE

SEQ ID NO: 23224 - protein, 13 aa, Severe acute respiratory syndrome-related coronavirus
  REGION 1..13: note = Table B: HLA-DQA1*05:05-B1*03:19L
  source 1..13: note = Severe acute respiratory syndrome coronavirus 2
SEDKRAKVTSAMQ

SEQ ID NO: 23225 - protein, 10 aa, Severe acute respiratory syndrome-related coronavirus
  REGION 1..10: note = Table B: HLA-DQA1*05:05-B1*03:19L
  source 1..10: note = Severe acute respiratory syndrome coronavirus 2
LDNDALNNII

SEQ ID NO: 23226 - protein, 10 aa, Severe acute respiratory syndrome-related coronavirus
  REGION 1..10: note = Table B: HLA-DQA1*05:05-B1*03:19L HLA-DQA1*05:01-B1*02:01L
  source 1..10: note = Severe acute respiratory syndrome coronavirus 2
AKLMVVIPDY

SEQ ID NO: 23227 - protein, 10 aa, Severe acute respiratory syndrome-related coronavirus
  REGION 1..10: note = Table B: HLA-DQA1*05:05-B1*03:19L HLA-DQA1*05:01-B1*02:01L
  source 1..10: note = Severe acute respiratory syndrome coronavirus 2
SMDNSPNLAW

SEQ ID NO: 23228 - protein, 11 aa, Severe acute respiratory syndrome-related coronavirus
  REGION 1..11: note = Table B: HLA-DQA1*05:05-B1*03:19L HLA-DPA1*03:01-B1*105:01L
  source 1..11: note = Severe acute respiratory syndrome coronavirus 2
ANSAVKLQNNE

SEQ ID NO: 23229 - protein, 10 aa, Severe acute respiratory syndrome-related coronavirus
  REGION 1..10: note = Table B: HLA-DQA1*05:05-B1*03:19L HLA-DQA1*05:01-B1*02:01L
  source 1..10: note = Severe acute respiratory syndrome coronavirus 2
ACTDDNALAY

SEQ ID NO: 23230 - protein, 10 aa, Severe acute respiratory syndrome-related coronavirus
  REGION 1..10: note = Table B: HLA-DQA1*05:05-B1*03:19L
  source 1..10: note = Severe acute respiratory syndrome coronavirus 2
PKSDGTGTIY

SEQ ID NO: 23231 - protein, 13 aa, Severe acute respiratory syndrome-related coronavirus
  REGION 1..13: note = Table B: HLA-DQA1*05:05-B1*03:19L HLA-DPA1*03:01-B1*105:01L
  source 1..13: note = Severe acute respiratory syndrome coronavirus 2
LNRGMVLGSLAAT

SEQ ID NO: 23232 - protein, 11 aa, Severe acute respiratory syndrome-related coronavirus
  REGION 1..11: note = Table B: HLA-DQA1*05:05-B1*03:19L HLA-DPA1*03:01-B1*105:01L HLA-DRB1*14:17L
  source 1..11: note = Severe acute respiratory syndrome coronavirus 2
LAATVRLQAGN

SEQ ID NO: 23233 - protein, 14 aa, Severe acute respiratory syndrome-related coronavirus
  REGION 1..14: note = Table B: HLA-DQA1*05:05-B1*03:19L HLA-DQA1*05:05-B1*03:01L HLA-DQA1*02:01-B1*03:03L
  source 1..14: note = Severe acute respiratory syndrome coronavirus 2
VPANSTVLSFCAFA

SEQ ID NO: 23234 - protein, 16 aa, Severe acute respiratory syndrome-related coronavirus
  REGION 1..16: note = Table B: HLA-DQA1*05:05-B1*03:19L
  source 1..16: note = Severe acute respiratory syndrome coronavirus 2
GGQPITNCVKMLCTHT

SEQ ID NO: 23235 - protein, 10 aa, Severe acute respiratory syndrome-related coronavirus
  REGION 1..10: note = Table B: HLA-DQA1*05:05-B1*03:19L
  source 1..10: note = Severe acute respiratory syndrome coronavirus 2
PEANMDQESF

SEQ ID NO: 23236 - protein, 10 aa, Severe acute respiratory syndrome-related coronavirus
  REGION 1..10: note = Table B: HLA-DQA1*05:05-B1*03:19L
  source 1..10: note = Severe acute respiratory syndrome coronavirus 2
QESFGGASCC

SEQ ID NO: 23237 - protein, 10 aa, Severe acute respiratory syndrome-related coronavirus
  REGION 1..10: note = Table B: HLA-DQA1*05:05-B1*03:19L
  source 1..10: note = Severe acute respiratory syndrome coronavirus 2
FTLKNTVCTV

SEQ ID NO: 23238 - protein, 19 aa, Severe acute respiratory syndrome-related coronavirus
  REGION 1..19: note = Table B: HLA-DQA1*05:05-B1*03:19L
  source 1..19: note = Severe acute respiratory syndrome coronavirus 2
DAQSFLNRVCGVSAARLTP

SEQ ID NO: 23239 - protein, 14 aa, Severe acute respiratory syndrome-related coronavirus
  REGION 1..14: note = Table B: HLA-DQA1*05:05-B1*03:19L HLA-DQA1*01:03-B1*06:01L
  source 1..14: note = Severe acute respiratory syndrome coronavirus 2
RLTPCGTGTSTDVV

SEQ ID NO: 23240 - protein, 10 aa, Severe acute respiratory syndrome-related coronavirus
  REGION 1..10: note = Table B: HLA-DQA1*05:05-B1*03:19L
  source 1..10: note = Severe acute respiratory syndrome coronavirus 2
TDVVYRAFDI

SEQ ID NO: 23241 - protein, 10 aa, Severe acute respiratory syndrome-related coronavirus
  REGION 1..10: note = Table B: HLA-DQA1*05:05-B1*03:19L HLA-DQA1*02:01-B1*03:03L
  source 1..10: note = Severe acute respiratory syndrome coronavirus 2
NDKVAGFAKF

SEQ ID NO: 23242 - protein, 10 aa, Severe acute respiratory syndrome-related coronavirus
  REGION 1..10: note = Table B: HLA-DQA1*05:05-B1*03:19L
  source 1..10: note = Severe acute respiratory syndrome coronavirus 2
EDDNLIDSYF

SEQ ID NO: 23243 - protein, 10 aa, Severe acute respiratory syndrome-related coronavirus
  REGION 1..10: note = Table B: HLA-DQA1*05:05-B1*03:19L
  source 1..10: note = Severe acute respiratory syndrome coronavirus 2
KEILVTYNCC

SEQ ID NO: 23244 - protein, 10 aa, Severe acute respiratory syndrome-related coronavirus
  REGION 1..10: note = Table B: HLA-DQA1*05:05-B1*03:19L
  source 1..10: note = Severe acute respiratory syndrome coronavirus 2
DDDYFNKKDW

SEQ ID NO: 23245 - protein, 10 aa, Severe acute respiratory syndrome-related coronavirus
  REGION 1..10: note = Table B: HLA-DQA1*05:05-B1*03:19L HLA-DQA1*05:01-B1*02:01L
  source 1..10: note = Severe acute respiratory syndrome coronavirus 2
LDNQDLNGNW

SEQ ID NO: 23246 - protein, 10 aa, Severe acute respiratory syndrome-related coronavirus
  REGION 1..10: note = Table B: HLA-DQA1*05:05-B1*03:19L
  source 1..10: note = Severe acute respiratory syndrome coronavirus 2
QDLNGNWYDF

SEQ ID NO: 23247 - protein, 10 aa, Severe acute respiratory syndrome-related coronavirus
  REGION 1..10: note = Table B: HLA-DQA1*05:05-B1*03:19L
  source 1..10: note = Severe acute respiratory syndrome coronavirus 2
GSGVPVVDSY

SEQ ID NO: 23248 - protein, 11 aa, Severe acute respiratory syndrome-related coronavirus
  REGION 1..11: note = Table B: HLA-DQA1*05:05-B1*03:19L HLA-DPA1*01:03-B1*104:01L
  source 1..11: note = Severe acute respiratory syndrome coronavirus 2
RELGVVHNQDV

SEQ ID NO: 23249 - protein, 12 aa, Severe acute respiratory syndrome-related coronavirus
  REGION 1..12: note = Table B: HLA-DQA1*05:05-B1*03:19L HLA-DQA1*05:05-B1*03:01L
  source 1..12: note = Severe acute respiratory syndrome coronavirus 2
ADPAMHAASGNL

SEQ ID NO: 23250 - protein, 10 aa, Severe acute respiratory syndrome-related coronavirus
  REGION 1..10: note = Table B: HLA-DQA1*05:05-B1*03:19L
  source 1..10: note = Severe acute respiratory syndrome coronavirus 2
LTNNVAFQTV

SEQ ID NO: 23251 - protein, 10 aa, Severe acute respiratory syndrome-related coronavirus
  REGION 1..10: note = Table B: HLA-DQA1*05:05-B1*03:19L
  source 1..10: note = Severe acute respiratory syndrome coronavirus 2
QDGNAAISDY

SEQ ID NO: 23252 - protein, 10 aa, Severe acute respiratory syndrome-related coronavirus
  REGION 1..10: note = Table B: HLA-DQA1*05:05-B1*03:19M HLA-DPA1*01:03-B1*104:01L
  source 1..10: note = Severe acute respiratory syndrome coronavirus 2
VEVVDKYFDC

SEQ ID NO: 23253 - protein, 15 aa, Severe acute respiratory syndrome-related coronavirus
  REGION 1..15: note = Table B: HLA-DQA1*05:05-B1*03:19L HLA-DQA1*02:01-B1*03:03L
  source 1..15: note = Severe acute respiratory syndrome coronavirus 2
VVDKYFDCYDGGCIN

SEQ ID NO: 23254 - protein, 10 aa, Severe acute respiratory syndrome-related coronavirus
  REGION 1..10: note = Table B: HLA-DQA1*05:05-B1*03:19L
  source 1..10: note = Severe acute respiratory syndrome coronavirus 2
ARLYYDSMSY

SEQ ID NO: 23255 - protein, 12 aa, Severe acute respiratory syndrome-related coronavirus
  REGION 1..12: note = Table B: HLA-DQA1*05:05-B1*03:19L HLA-DQA1*05:05-B1*03:01L HLA-DQA1*01:03-B1*06:01L
  source 1..12: note = Severe acute respiratory syndrome coronavirus 2
TVAGVSICSTMT

SEQ ID NO: 23256 - protein, 10 aa, Severe acute respiratory syndrome-related coronavirus
  REGION 1..10: note = Table B: HLA-DQA1*05:05-B1*03:19L HLA-DRB1*16:01L HLA-DQA1*02:01-B1*03:03L
  source 1..10: note = Severe acute respiratory syndrome coronavirus 2
IAATRGATVV

SEQ ID NO: 23257 - protein, 10 aa, Severe acute respiratory syndrome-related coronavirus
  REGION 1..10: note = Table B: HLA-DQA1*05:05-B1*03:19L
  source 1..10: note = Severe acute respiratory syndrome coronavirus 2
ENPHLMGWDY

SEQ ID NO: 23258 - protein, 18 aa, Severe acute respiratory syndrome-related coronavirus
  REGION 1..18: note = Table B: HLA-DQA1*05:05-B1*03:19L
  source 1..18: note = Severe acute respiratory syndrome coronavirus 2
LQHRLYECLYRNRDVDTD

SEQ ID NO: 23259 - protein, 12 aa, Severe acute respiratory syndrome-related coronavirus
  REGION 1..12: note = Table B: HLA-DQA1*05:05-B1*03:19L
  source 1..12: note = Severe acute respiratory syndrome coronavirus 2
SDDAVVCFNSTY

SEQ ID NO: 23260 - protein, 13 aa, Severe acute respiratory syndrome-related coronavirus
  REGION 1..13: note = Table B: HLA-DQA1*05:05-B1*03:19L HLA-DPA1*01:03-B1*04:02L HLA-DQA1*05:05-B1*03:01L HLA-DQA1*02:01-B1*03:03L
  source 1..13: note = Severe acute respiratory syndrome coronavirus 2
VFMSEAKCWTETD

SEQ ID NO: 23261 - protein, 14 aa, Severe acute respiratory syndrome-related coronavirus
  REGION 1..14: note = Table B: HLA-DQA1*05:05-B1*03:19L HLA-DPA1*03:01-B1*105:01L HLA-DQA1*05:05-B1*03:01L
  source 1..14: note = Severe acute respiratory syndrome coronavirus 2
VLQAVGACVLCNSQ

SEQ ID NO: 23262 - protein, 14 aa, Severe acute respiratory syndrome-related coronavirus
  REGION 1..14: note = Table B: HLA-DQA1*05:05-B1*03:19L HLA-DPA1*03:01-B1*105:01L
  source 1..14: note = Severe acute respiratory syndrome coronavirus 2
LQAVGACVLCNSQT

SEQ ID NO: 23263 - protein, 10 aa, Severe acute respiratory syndrome-related coronavirus
  REGION 1..10: note = Table B: HLA-DQA1*05:05-B1*03:19L
  source 1..10: note = Severe acute respiratory syndrome coronavirus 2
SDNVTDFNAI

SEQ ID NO: 23264 - protein, 12 aa, Severe acute respiratory syndrome-related coronavirus
  REGION 1..12: note = Table B: HLA-DQA1*05:05-B1*03:19L HLA-DQA1*05:01-B1*02:01L
  source 1..12: note = Severe acute respiratory syndrome coronavirus 2
VTDFNAIATCDW

SEQ ID NO: 23265 - protein, 14 aa, Severe acute respiratory syndrome-related coronavirus
  REGION 1..14: note = Table B: HLA-DQA1*05:05-B1*03:19L HLA-DPA1*03:01-B1*105:01L HLA-DQA1*05:05-B1*03:01L HLA-DQA1*02:01-B1*03:03L
  source 1..14: note = Severe acute respiratory syndrome coronavirus 2
TNAGDYILANTCTE

SEQ ID NO: 23266 - protein, 10 aa, Severe acute respiratory syndrome-related coronavirus
  REGION 1..10: note = Table B: HLA-DQA1*05:05-B1*03:19M HLA-DPA1*01:03-B1*104:01L
  source 1..10: note = Severe acute respiratory syndrome coronavirus 2
EETFKLSYGI

SEQ ID NO: 23267 - protein, 13 aa, Severe acute respiratory syndrome-related coronavirus
  REGION 1..13: note = Table B: HLA-DQA1*05:05-B1*03:19L
  source 1..13: note = Severe acute respiratory syndrome coronavirus 2
TFKLSYGIATVRE

SEQ ID NO: 23268 - protein, 10 aa, Severe acute respiratory syndrome-related coronavirus
  REGION 1..10: note = Table B: HLA-DQA1*05:05-B1*03:19L HLA-DRB1*16:01L
  source 1..10: note = Severe acute respiratory syndrome coronavirus 2
RVTKNSKVQI

SEQ ID NO: 23269 - protein, 18 aa, Severe acute respiratory syndrome-related coronavirus
  REGION 1..18: note = Table B: HLA-DQA1*05:05-B1*03:19L HLA-DQA1*05:01-B1*02:01L HLA-DPA1*01:03-B1*104:01L HLA-DQA1*05:05-B1*03:01L HLA-DRB1*08:02L HLA-DRB1*08:03L
  source 1..18: note = Severe acute respiratory syndrome coronavirus 2
EKALKYLPIDKCSRIIPA

SEQ ID NO: 23270 - protein, 14 aa, Severe acute respiratory syndrome-related coronavirus
  REGION 1..14: note = Table B: HLA-DQA1*05:05-B1*03:19L HLA-DPA1*03:01-B1*105:01L HLA-DQA1*05:05-B1*03:01L HLA-DQA1*01:03-B1*06:01L
  source 1..14: note = Severe acute respiratory syndrome coronavirus 2
VFCTVNALPETTAD

SEQ ID NO: 23271 - protein, 10 aa, Severe acute respiratory syndrome-related coronavirus
  REGION 1..10: note = Table B: HLA-DQA1*05:05-B1*03:19L
  source 1..10: note = Severe acute respiratory syndrome coronavirus 2
PETTADIVVF

SEQ ID NO: 23272 - protein, 10 aa, Severe acute respiratory syndrome-related coronavirus
  REGION 1..10: note = Table B: HLA-DQA1*05:05-B1*03:19L
  source 1..10: note = Severe acute respiratory syndrome coronavirus 2
TADIVVFDEI

SEQ ID NO: 23273 - protein, 11 aa, Severe acute respiratory syndrome-related coronavirus
  REGION 1..11: note = Table B: HLA-DQA1*05:05-B1*03:19L HLA-DQA1*05:01-B1*02:01L
  source 1..11: note = Severe acute respiratory syndrome coronavirus 2
ILCIMSDRDLY

SEQ ID NO: 23274 - protein, 13 aa, Severe acute respiratory syndrome-related coronavirus
  REGION 1..13: note = Table B: HLA-DQA1*05:05-B1*03:19L HLA-DQA1*05:05-B1*03:01L
  source 1..13: note = Severe acute respiratory syndrome coronavirus 2
LHPTQAPTHLSVD

SEQ ID NO: 23275 - protein, 14 aa, Severe acute respiratory syndrome-related coronavirus
  REGION 1..14: note = Table B: HLA-DQA1*05:05-B1*03:19L HLA-DRB1*04:08L
  source 1..14: note = Severe acute respiratory syndrome coronavirus 2
VNGYPNMFITREEA

SEQ ID NO: 23276 - protein, 18 aa, Severe acute respiratory syndrome-related coronavirus
  REGION 1..18: note = Table B: HLA-DQA1*05:05-B1*03:19L
  source 1..18: note = Severe acute respiratory syndrome coronavirus 2
VDTPNNTDFSRVSAKPPP

SEQ ID NO: 23277 - protein, 10 aa, Severe acute respiratory syndrome-related coronavirus
  REGION 1..10: note = Table B: HLA-DQA1*05:05-B1*03:19L HLA-DPA1*01:03-B1*104:01L
  source 1..10: note = Severe acute respiratory syndrome coronavirus 2
FDYVYNPFMI

SEQ ID NO: 23278 - protein, 16 aa, Severe acute respiratory syndrome-related coronavirus
  REGION 1..16: note = Table B: HLA-DQA1*05:05-B1*03:19L HLA-DPA1*01:03-B1*04:02L
  source 1..16: note = Severe acute respiratory syndrome coronavirus 2
SNHDLYCQVHGNAHVA

SEQ ID NO: 23279 - protein, 11 aa, Severe acute respiratory syndrome-related coronavirus
  REGION 1..11: note = Table B: HLA-DQA1*05:05-B1*03:19L
  source 1..11: note = Severe acute respiratory syndrome coronavirus 2
YDAQPCSDKAY

SEQ ID NO: 23280 - protein, 10 aa, Severe acute respiratory syndrome-related coronavirus
  REGION 1..10: note = Table B: HLA-DQA1*05:05-B1*03:19L HLA-DQA1*05:01-B1*02:01L HLA-DQA1*03:01-B1*03:02L
  source 1..10: note = Severe acute respiratory syndrome coronavirus 2
GKQVVSDIDY

SEQ ID NO: 23281 - protein, 11 aa, Severe acute respiratory syndrome-related coronavirus
  REGION 1..11: note = Table B: HLA-DQA1*05:05-B1*03:19L HLA-DPA1*01:03-B1*104:01L
  source 1..11: note = Severe acute respiratory syndrome coronavirus 2
RLYLDAYNMMI

SEQ ID NO: 23282 - protein, 10 aa, Severe acute respiratory syndrome-related coronavirus
  REGION 1..10: note = Table B: HLA-DQA1*05:05-B1*03:19L
  source 1..10: note = Severe acute respiratory syndrome coronavirus 2
FDTYNLWNTF

SEQ ID NO: 23283 - protein, 12 aa, Severe acute respiratory syndrome-related coronavirus
  REGION 1..12: note = Table B: HLA-DQA1*05:05-B1*03:19L HLA-DPA1*01:03-B1*104:01L HLA-DQA1*01:03-B1*06:01L
  source 1..12: note = Severe acute respiratory syndrome coronavirus 2
GEVPVSIINNTV

SEQ ID NO: 23284 - protein, 11 aa, Severe acute respiratory syndrome-related coronavirus
  REGION 1..11: note = Table B: HLA-DQA1*05:05-B1*03:19L HLA-DRB1*15:03L
  source 1..11: note = Severe acute respiratory syndrome coronavirus 2
YTKVDGVDVEL

SEQ ID NO: 23285 - protein, 10 aa, Severe acute respiratory syndrome-related coronavirus
  REGION 1..10: note = Table B: HLA-DQA1*05:05-B1*03:19L HLA-DQA1*05:01-B1*02:01L
  source 1..10: note = Severe acute respiratory syndrome coronavirus 2
VDIAANTVIW

SEQ ID NO: 23286 - protein, 14 aa, Severe acute respiratory syndrome-related coronavirus
  REGION 1..14: note = Table B: HLA-DQA1*05:05-B1*03:19L HLA-DRB1*07:01L
  source 1..14: note = Severe acute respiratory syndrome coronavirus 2
VIWDYKRDAPAHIS

SEQ ID NO: 23287 - protein, 10 aa, Severe acute respiratory syndrome-related coronavirus
  REGION 1..10: note = Table B: HLA-DQA1*05:05-B1*03:19L HLA-DPA1*01:03-B1*104:01L
  source 1..10: note = Severe acute respiratory syndrome coronavirus 2
TETICAPLTV

SEQ ID NO: 23288 - protein, 10 aa, Severe acute respiratory syndrome-related coronavirus
  REGION 1..10: note = Table B: HLA-DQA1*05:05-B1*03:19L HLA-DPA1*01:03-B1*104:01L
  source 1..10: note = Severe acute respiratory syndrome coronavirus 2
KLEGYAFEHI

SEQ ID NO: 23289 - protein, 11 aa, Severe acute respiratory syndrome-related coronavirus
  REGION 1..11: note = Table B: HLA-DQA1*05:05-B1*03:19L
  source 1..11: note = Severe acute respiratory syndrome coronavirus 2
LEDFIPMDSTV

SEQ ID NO: 23290 - protein, 10 aa, Severe acute respiratory syndrome-related coronavirus
  REGION 1..10: note = Table B: HLA-DQA1*05:05-B1*03:19L
  source 1..10: note = Severe acute respiratory syndrome coronavirus 2
MDSTVKNYFI

SEQ ID NO: 23291 - protein, 10 aa, Severe acute respiratory syndrome-related coronavirus
  REGION 1..10: note = Table B: HLA-DQA1*05:05-B1*03:19L
  source 1..10: note = Severe acute respiratory syndrome coronavirus 2
IDYTEISFML

SEQ ID NO: 23292 - protein, 10 aa, Severe acute respiratory syndrome-related coronavirus
  REGION 1..10: note = Table B: HLA-DQA1*05:05-B1*03:19L
  source 1..10: note = Severe acute respiratory syndrome coronavirus 2
LLEKCDLQNY

SEQ ID NO: 23293 - protein, 12 aa, Severe acute respiratory syndrome-related coronavirus
  REGION 1..12: note = Table B: HLA-DQA1*05:05-B1*03:19L HLA-DQA1*05:05-B1*03:01L
  source 1..12: note = Severe acute respiratory syndrome coronavirus 2
GSDKGVAPGTAV

SEQ ID NO: 23294 - protein, 13 aa, Severe acute respiratory syndrome-related coronavirus
  REGION 1..13: note = Table B: HLA-DQA1*05:05-B1*03:19L HLA-DQA1*03:01-B1*03:02L HLA-DQA1*05:05-B1*03:01L
  source 1..13: note = Severe acute respiratory syndrome coronavirus 2
APGTAVLRQWLPT

SEQ ID NO: 23295 - protein, 10 aa, Severe acute respiratory syndrome-related coronavirus
  REGION 1..10: note = Table B: HLA-DQA1*05:05-B1*03:19L HLA-DQA1*02:01-B1*03:03L
  source 1..10: note = Severe acute respiratory syndrome coronavirus 2
TKENDSKEGF

SEQ ID NO: 23296 - protein, 10 aa, Severe acute respiratory syndrome-related coronavirus
  REGION 1..10: note = Table B: HLA-DQA1*05:05-B1*03:19L
  source 1..10: note = Severe acute respiratory syndrome coronavirus 2
ALGGSVAIKI

SEQ ID NO: 23297 - protein, 12 aa, Severe acute respiratory syndrome-related coronavirus
  REGION 1..12: note = Table B: HLA-DQA1*05:05-B1*03:19L HLA-DQA1*05:05-B1*03:01L HLA-DQA1*02:01-B1*03:03L
  source 1..12: note = Severe acute respiratory syndrome coronavirus 2
WWTAFVTNVNAS

SEQ ID NO: 23298 - protein, 12 aa, Severe acute respiratory syndrome-related coronavirus
  REGION 1..12: note = Table B: HLA-DQA1*05:05-B1*03:19L
  source 1..12: note = Severe acute respiratory syndrome coronavirus 2
YLGKPREQIDGY

SEQ ID NO: 23299 - protein, 12 aa, Severe acute respiratory syndrome-related coronavirus
  REGION 1..12: note = Table B: HLA-DQA1*05:05-B1*03:19L HLA-DQA1*05:05-B1*03:01L
  source 1..12: note = Severe acute respiratory syndrome coronavirus 2
LRGTAVMSLKEG

SEQ ID NO: 23300 - protein, 14 aa, Severe acute respiratory syndrome-related coronavirus
  REGION 1..14: note = Table B: HLA-DQA1*05:05-B1*03:19L HLA-DPA1*01:03-B1*104:01L
  source 1..14: note = Severe acute respiratory syndrome coronavirus 2
ENNRVVISSDVLVN

SEQ ID NO: 23301 - protein, 10 aa, Severe acute respiratory syndrome-related coronavirus
  REGION 1..10: note = Table B: HLA-DQA1*05:05-B1*03:19L
  source 1..10: note = Severe acute respiratory syndrome coronavirus 2
TNSFTRGVYY

SEQ ID NO: 23302 - protein, 14 aa, Severe acute respiratory syndrome-related coronavirus
  REGION 1..14: note = Table B: HLA-DQA1*05:05-B1*03:19L
  source 1..14: note = Severe acute respiratory syndrome coronavirus 2
NSFTRGVYYPDKVF

SEQ ID NO: 23303 - protein, 11 aa, Severe acute respiratory syndrome-related coronavirus
  REGION 1..11: note = Table B: HLA-DQA1*05:05-B1*03:19L HLA-DQA1*01:03-B1*06:01L HLA-DQA1*02:01-B1*03:03L
  source 1..11: note = Severe acute respiratory syndrome coronavirus 2
YYPDKVFRSSV

SEQ ID NO: 23304 - protein, 10 aa, Severe acute respiratory syndrome-related coronavirus
  REGION 1..10: note = Table B: HLA-DQA1*05:05-B1*03:19L HLA-DPA1*02:01-B1*13:01L HLA-DQA1*01:03-B1*06:01L
  source 1..10: note = Severe acute respiratory syndrome coronavirus 2
YFASTEKSNI

SEQ ID NO: 23305 - protein, 14 aa, Severe acute respiratory syndrome-related coronavirus
  REGION 1..14: note = Table B: HLA-DQA1*05:05-B1*03:19L
  source 1..14: note = Severe acute respiratory syndrome coronavirus 2
PGDSSSGWTAGAAA

SEQ ID NO: 23306 - protein, 11 aa, Severe acute respiratory syndrome-related coronavirus
  REGION 1..11: note = Table B: HLA-DQA1*05:05-B1*03:19L
  source 1..11: note = Severe acute respiratory syndrome coronavirus 2
KLPDDFTGCVI

SEQ ID NO: 23307 - protein, 10 aa, Severe acute respiratory syndrome-related coronavirus
  REGION 1..10: note = Table B: HLA-DQA1*05:05-B1*03:19L
  source 1..10: note = Severe acute respiratory syndrome coronavirus 2
FNCYFPLQSY

SEQ ID NO: 23308 - protein, 11 aa, Severe acute respiratory syndrome-related coronavirus
  REGION 1..11: note = Table B: HLA-DQA1*05:05-B1*03:19L
  source 1..11: note = Severe acute respiratory syndrome coronavirus 2
QSYGFQPTNGV

SEQ ID NO: 23309 - protein, 17 aa, Severe acute respiratory syndrome-related coronavirus
  REGION 1..17: note = Table B: HLA-DQA1*05:05-B1*03:19L HLA-DRB3*01:01L HLA-DPA1*03:01-B1*105:01L
  source 1..17: note = Severe acute respiratory syndrome coronavirus 2
GPKKSTNLVKNKCVNFN

SEQ ID NO: 23310 - protein, 14 aa, Severe acute respiratory syndrome-related coronavirus
  REGION 1..14: note = Table B: HLA-DQA1*05:05-B1*03:19L HLA-DQA1*05:05-B1*03:01L
  source 1..14: note = Severe acute respiratory syndrome coronavirus 2
TPCSFGGVSVITPG

SEQ ID NO: 23311 - protein, 12 aa, Severe acute respiratory syndrome-related coronavirus
  REGION 1..12: note = Table B: HLA-DQA1*05:05-B1*03:19L HLA-DQA1*05:05-B1*03:01L
  source 1..12: note = Severe acute respiratory syndrome coronavirus 2
SFGGVSVITPGT

SEQ ID NO: 23312 - protein, 10 aa, Severe acute respiratory syndrome-related coronavirus
  REGION 1..10: note = Table B: HLA-DQA1*05:05-B1*03:19L
  source 1..10: note = Severe acute respiratory syndrome coronavirus 2
ADQLTPTWRV

SEQ ID NO: 23313 - protein, 10 aa, Severe acute respiratory syndrome-related coronavirus
  REGION 1..10: note = Table B: HLA-DQA1*05:05-B1*03:19L
  source 1..10: note = Severe acute respiratory syndrome coronavirus 2
TKTSVDCTMY

SEQ ID NO: 23314 - protein, 14 aa, Severe acute respiratory syndrome-related coronavirus
  REGION 1..14: note = Table B: HLA-DQA1*05:05-B1*03:19L HLA-DPA1*01:03-B1*04:01L HLA-DQA1*02:01-B1*03:03L
  source 1..14: note = Severe acute respiratory syndrome coronavirus 2
NLLLQYGSFCTQLN

SEQ ID NO: 23315 - protein, 14 aa, Severe acute respiratory syndrome-related coronavirus
  REGION 1..14: note = Table B: HLA-DQA1*05:05-B1*03:19L
  source 1..14: note = Severe acute respiratory syndrome coronavirus 2
LQYGSFCTQLNRAL

SEQ ID NO: 23316 - protein, 14 aa, Severe acute respiratory syndrome-related coronavirus
  REGION 1..14: note = Table B: HLA-DQA1*05:05-B1*03:19L
  source 1..14: note = Severe acute respiratory syndrome coronavirus 2
LLFNKVTLADAGFI

SEQ ID NO: 23317 - protein, 16 aa, Severe acute respiratory syndrome-related coronavirus
  REGION 1..16: note = Table B: HLA-DQA1*05:05-B1*03:19L
  source 1..16: note = Severe acute respiratory syndrome coronavirus 2
IKQYGDCLGDIAARDL

SEQ ID NO: 23318 - protein, 10 aa, Severe acute respiratory syndrome-related coronavirus
  REGION 1..10: note = Table B: HLA-DQA1*05:05-B1*03:19L
  source 1..10: note = Severe acute respiratory syndrome coronavirus 2
LGDIAARDLI

SEQ ID NO: 23319 - protein, 10 aa, Severe acute respiratory syndrome-related coronavirus
  REGION 1..10: note = Table B: HLA-DQA1*05:05-B1*03:19L
  source 1..10: note = Severe acute respiratory syndrome coronavirus 2
MQMAYRFNGI

SEQ ID NO: 23320 - protein, 11 aa, Severe acute respiratory syndrome-related coronavirus
  REGION 1..11: note = Table B: HLA-DQA1*05:05-B1*03:19L
  source 1..11: note = Severe acute respiratory syndrome coronavirus 2
RFNGIGVTQNV

SEQ ID NO: 23321 - protein, 11 aa, Severe acute respiratory syndrome-related coronavirus
  REGION 1..11: note = Table B: HLA-DQA1*05:05-B1*03:19L HLA-DQA1*01:03-B1*06:01L
  source 1..11: note = Severe acute respiratory syndrome coronavirus 2
DVVNQNAQALN

SEQ ID NO: 23322 - protein, 10 aa, Severe acute respiratory syndrome-related coronavirus
  REGION 1..10: note = Table B: HLA-DQA1*05:05-B1*03:19L
  source 1..10: note = Severe acute respiratory syndrome coronavirus 2
NDILSRLDKV

SEQ ID NO: 23323 - protein, 10 aa, Severe acute respiratory syndrome-related coronavirus
  REGION 1..10: note = Table B: HLA-DQA1*05:05-B1*03:19L
  source 1..10: note = Severe acute respiratory syndrome coronavirus 2
LDKVEAEVQI

SEQ ID NO: 23324 - protein, 11 aa, Severe acute respiratory syndrome-related coronavirus
  REGION 1..11: note = Table B: HLA-DQA1*05:05-B1*03:19L HLA-DQA1*05:01-B1*02:01L
  source 1..11: note = Severe acute respiratory syndrome coronavirus 2
ITGRLQSLQTY

SEQ ID NO: 23325 - protein, 10 aa, Severe acute respiratory syndrome-related coronavirus
  REGION 1..10: note = Table B: HLA-DQA1*05:05-B1*03:19L
  source 1..10: note = Severe acute respiratory syndrome coronavirus 2
TQQLIRAAEI

SEQ ID NO: 23326 - protein, 11 aa, Severe acute respiratory syndrome-related coronavirus
  REGION 1..11: note = Table B: HLA-DQA1*05:05-B1*03:19L
  source 1..11: note = Severe acute respiratory syndrome coronavirus 2
NFTTAPAICHD

SEQ ID NO: 23327 - protein, 10 aa, Severe acute respiratory syndrome-related coronavirus
  REGION 1..10: note = Table B: HLA-DQA1*05:05-B1*03:19L
  source 1..10: note = Severe acute respiratory syndrome coronavirus 2
FVSNGTHWFV

SEQ ID NO: 23328 - protein, 13 aa, Severe acute respiratory syndrome-related coronavirus
  REGION 1..13: note = Table B: HLA-DQA1*05:05-B1*03:19L
  source 1..13: note = Severe acute respiratory syndrome coronavirus 2
TDNTFVSGNCDVV

SEQ ID NO: 23329 - protein, 14 aa, Severe acute respiratory syndrome-related coronavirus
  REGION 1..14: note = Table B: HLA-DQA1*05:05-B1*03:19L HLA-DPA1*03:01-B1*105:01L
  source 1..14: note = Severe acute respiratory syndrome coronavirus 2
FVSGNCDVVIGIVN

SEQ ID NO: 23330 - protein, 11 aa, Severe acute respiratory syndrome-related coronavirus
  REGION 1..11: note = Table B: HLA-DQA1*05:05-B1*03:19L
  source 1..11: note = Severe acute respiratory syndrome coronavirus 2
YDPLQPELDSF

SEQ ID NO: 23331 - protein, 10 aa, Severe acute respiratory syndrome-related coronavirus
  REGION 1..10: note = Table B: HLA-DQA1*05:05-B1*03:19L HLA-DQA1*01:03-B1*06:01L
  source 1..10: note = Severe acute respiratory syndrome coronavirus 2
ASVVNIQKEI

SEQ ID NO: 23332 - protein, 10 aa, Severe acute respiratory syndrome-related coronavirus
  REGION 1..10: note = Table B: HLA-DQA1*05:05-B1*03:19L
  source 1..10: note = Severe acute respiratory syndrome coronavirus 2
QKEIDRLNEV

SEQ ID NO: 23333 - protein, 10 aa, Severe acute respiratory syndrome-related coronavirus
  REGION 1..10: note = Table B: HLA-DQA1*05:05-B1*03:19L HLA-DPA1*02:01-B1*13:01L HLA-DQA1*01:03-B1*06:01L
  source 1..10: note = Severe acute respiratory syndrome coronavirus 2
EQYIKWPWYI

SEQ ID NO: 23334 - protein, 10 aa, Severe acute respiratory syndrome-related coronavirus
  REGION 1..10: note = Table B: HLA-DQA1*05:05-B1*03:19M HLA-DPA1*01:03-B1*104:01L
  source 1..10: note = Severe acute respiratory syndrome coronavirus 2
MDLFMRIFTI

SEQ ID NO: 23335 - protein, 13 aa, Severe acute respiratory syndrome-related coronavirus
  REGION 1..13: note = Table B: HLA-DQA1*05:05-B1*03:19L
  source 1..13: note = Severe acute respiratory syndrome coronavirus 2
IFTIGTVTLKQGE

SEQ ID NO: 23336 - protein, 10 aa, Severe acute respiratory syndrome-related coronavirus
  REGION 1..10: note = Table B: HLA-DQA1*05:05-B1*03:19L
  source 1..10: note = Severe acute respiratory syndrome coronavirus 2
SDFVRATATI

SEQ ID NO: 23337 - protein, 10 aa, Severe acute respiratory syndrome-related coronavirus
  REGION 1..10: note = Table B: HLA-DQA1*05:05-B1*03:19L HLA-DRB1*16:01L HLA-DQA1*02:01-B1*03:03L
  source 1..10: note = Severe acute respiratory syndrome coronavirus 2
LALSKGVHFV

SEQ ID NO: 23338 - protein, 10 aa, Severe acute respiratory syndrome-related coronavirus
  REGION 1..10: note = Table B: HLA-DQA1*05:05-B1*03:19L
  source 1..10: note = Severe acute respiratory syndrome coronavirus 2
VTVYSHLLLV

SEQ ID NO: 23339 - protein, 10 aa, Severe acute respiratory syndrome-related coronavirus
  REGION 1..10: note = Table B: HLA-DQA1*05:05-B1*03:19L
  source 1..10: note = Severe acute respiratory syndrome coronavirus 2
LEAPFLYLYA

SEQ ID NO: 23340 - protein, 10 aa, Severe acute respiratory syndrome-related coronavirus
  REGION 1..10: note = Table B: HLA-DQA1*05:05-B1*03:19L HLA-DPA1*02:01-B1*13:01L HLA-DQA1*01:03-B1*06:01L HLA-DRB1*15:03L
  source 1..10: note = Severe acute respiratory syndrome coronavirus 2
VYFLQSINFV

SEQ ID NO: 23341 - protein, 10 aa, Severe acute respiratory syndrome-related coronavirus
  REGION 1..10: note = Table B: HLA-DQA1*05:05-B1*03:19L
  source 1..10: note = Severe acute respiratory syndrome coronavirus 2
KNPLLYDANY

SEQ ID NO: 23342 - protein, 13 aa, Severe acute respiratory syndrome-related coronavirus
  REGION 1..13: note = Table B: HLA-DQA1*05:05-B1*03:19L
  source 1..13: note = Severe acute respiratory syndrome coronavirus 2
NCYDYCIPYNSVT

SEQ ID NO: 23343 - protein, 13 aa, Severe acute respiratory syndrome-related coronavirus
  REGION 1..13: note = Table B: HLA-DQA1*05:05-B1*03:19L HLA-DQA1*05:05-B1*03:01L
  source 1..13: note = Severe acute respiratory syndrome coronavirus 2
SIVITSGDGTTSP

SEQ ID NO: 23344 - protein, 10 aa, Severe acute respiratory syndrome-related coronavirus
  REGION 1..10: note = Table B: HLA-DQA1*05:05-B1*03:19L HLA-DPA1*01:03-B1*104:01L
  source 1..10: note = Severe acute respiratory syndrome coronavirus 2
WESGVKDCVV

SEQ ID NO: 23345 - protein, 10 aa, Severe acute respiratory syndrome-related coronavirus
  REGION 1..10: note = Table B: HLA-DQA1*05:05-B1*03:19L HLA-DQA1*05:01-B1*02:01L
  source 1..10: note = Severe acute respiratory syndrome coronavirus 2
LHSYFTSDYY

SEQ ID NO: 23346 - protein, 10 aa, Severe acute respiratory syndrome-related coronavirus
  REGION 1..10: note = Table B: HLA-DQA1*05:05-B1*03:19L HLA-DPA1*01:03-B1*104:01L
  source 1..10: note = Severe acute respiratory syndrome coronavirus 2
VDEPEEHVQI

SEQ ID NO: 23347 - protein, 13 aa, Severe acute respiratory syndrome-related coronavirus
  REGION 1..13: note = Table B: HLA-DQA1*05:05-B1*03:19L HLA-DQA1*05:05-B1*03:01L HLA-DQA1*01:03-B1*06:01L
  source 1..13: note = Severe acute respiratory syndrome coronavirus 2
HTIDGSSGVVNPV

SEQ ID NO: 23348 - protein, 11 aa, Severe acute respiratory syndrome-related coronavirus
  REGION 1..11: note = Table B: HLA-DQA1*05:05-B1*03:19L
  source 1..11: note = Severe acute respiratory syndrome coronavirus 2
RINWITGGIAI

SEQ ID NO: 23349 - protein, 11 aa, Severe acute respiratory syndrome-related coronavirus
  REGION 1..11: note = Table B: HLA-DQA1*05:05-B1*03:19L
  source 1..11: note = Severe acute respiratory syndrome coronavirus 2
SMWSFNPETNI

SEQ ID NO: 23350 - protein, 18 aa, Severe acute respiratory syndrome-related coronavirus
  REGION 1..18: note = Table B: HLA-DQA1*05:05-B1*03:19L
  source 1..18: note = Severe acute respiratory syndrome coronavirus 2
IGAVILRGHLRIAGHHLG

SEQ ID NO: 23351 - protein, 10 aa, Severe acute respiratory syndrome-related coronavirus
  REGION 1..10: note = Table B: HLA-DQA1*05:05-B1*03:19L HLA-DRB1*16:01L
  source 1..10: note = Severe acute respiratory syndrome coronavirus 2
IKDLPKEITV

SEQ ID NO: 23352 - protein, 11 aa, Severe acute respiratory syndrome-related coronavirus
  REGION 1..11: note = Table B: HLA-DQA1*05:05-B1*03:19L
  source 1..11: note = Severe acute respiratory syndrome coronavirus 2
NTDHSSSSDNI

SEQ ID NO: 23353 - protein, 10 aa, Severe acute respiratory syndrome-related coronavirus
  REGION 1..10: note = Table B: HLA-DQA1*05:05-B1*03:19L HLA-DPA1*01:03-B1*104:01L
  source 1..10: note = Severe acute respiratory syndrome coronavirus 2
VDFQVTIAEI

SEQ ID NO: 23354 - protein, 19 aa, Severe acute respiratory syndrome-related coronavirus
  REGION 1..19: note = Table B: HLA-DQA1*05:05-B1*03:19L HLA-DRB1*09:01L HLA-DPA1*01:03-B1*104:01L
  source 1..19: note = Severe acute respiratory syndrome coronavirus 2
CPDGVKHVYQLRARSVSPK

SEQ ID NO: 23355 - protein, 19 aa, Severe acute respiratory syndrome-related coronavirus
  REGION 1..19: note = Table B: HLA-DQA1*05:05-B1*03:19L HLA-DPA1*01:03-B1*104:01L
  source 1..19: note = Severe acute respiratory syndrome coronavirus 2
PDGVKHVYQLRARSVSPKL

SEQ ID NO: 23356 - protein, 10 aa, Severe acute respiratory syndrome-related coronavirus
  REGION 1..10: note = Table B: HLA-DQA1*05:05-B1*03:19L HLA-DQA1*05:01-B1*02:01L
  source 1..10: note = Severe acute respiratory syndrome coronavirus 2
MIELSLIDFY

SEQ ID NO: 23357 - protein, 10 aa, Severe acute respiratory syndrome-related coronavirus
  REGION 1..10: note = Table B: HLA-DQA1*05:05-B1*03:19L
  source 1..10: note = Severe acute respiratory syndrome coronavirus 2
LELQDHNETC

SEQ ID NO: 23358 - protein, 15 aa, Severe acute respiratory syndrome-related coronavirus
  REGION 1..15: note = Table B: HLA-DQA1*05:05-B1*03:19L HLA-DQA1*01:03-B1*06:01L
  source 1..15: note = Severe acute respiratory syndrome coronavirus 2
VAAFHQECSLQSCTQ

SEQ ID NO: 23359 - protein, 11 aa, Severe acute respiratory syndrome-related coronavirus
  REGION 1..11: note = Table B: HLA-DQA1*05:05-B1*03:19L
  source 1..11: note = Severe acute respiratory syndrome coronavirus 2
RCSFYEDFLEY

SEQ ID NO: 23360 - protein, 13 aa, Severe acute respiratory syndrome-related coronavirus
  REGION 1..13: note = Table B: HLA-DQA1*05:05-B1*03:19L HLA-DQA1*05:05-B1*03:01L
  source 1..13: note = Severe acute respiratory syndrome coronavirus 2
PRITFGGPSDSTG

SEQ ID NO: 23361 - protein, 10 aa, Severe acute respiratory syndrome-related coronavirus
  REGION 1..10: note = Table B: HLA-DQA1*05:05-B1*03:19L
  source 1..10: note = Severe acute respiratory syndrome coronavirus 2
MKDLSPRWYF

SEQ ID NO: 23362 - protein, 12 aa, Severe acute respiratory syndrome-related coronavirus
  REGION 1..12: note = Table B: HLA-DQA1*05:05-B1*03:19L HLA-DQA1*05:05-B1*03:01L
  source 1..12: note = Severe acute respiratory syndrome coronavirus 2
YYLGTGPEAGLP

SEQ ID NO: 23363 - protein, 13 aa, Severe acute respiratory syndrome-related coronavirus
  REGION 1..13: note = Table B: HLA-DQA1*05:05-B1*03:19L HLA-DQA1*05:05-B1*03:01L HLA-DQA1*01:03-B1*06:01L
  source 1..13: note = Severe acute respiratory syndrome coronavirus 2
MAGNGGDAALALL

SEQ ID NO: 23364 - protein, 15 aa, Severe acute respiratory syndrome-related coronavirus
  REGION 1..15: note = Table B: HLA-DQA1*05:05-B1*03:19L HLA-DQA1*05:05-B1*03:01L HLA-DQA1*01:03-B1*06:01L
  source 1..15: note = Severe acute respiratory syndrome coronavirus 2
LESKMSGKGQQQQGQ

SEQ ID NO: 23365 - protein, 14 aa, Severe acute respiratory syndrome-related coronavirus
  REGION 1..14: note = Table B: HLA-DQA1*05:05-B1*03:19L HLA-DQA1*05:05-B1*03:01L
  source 1..14: note = Severe acute respiratory syndrome coronavirus 2
YNVTQAFGRRGPEQ

SEQ ID NO: 23366 - protein, 10 aa, Severe acute respiratory syndrome-related coronavirus
  REGION 1..10: note = Table B: HLA-DQA1*05:05-B1*03:19L HLA-DPA1*01:03-B1*104:01L
  source 1..10: note = Severe acute respiratory syndrome coronavirus 2
GTDYKHWPQI

SEQ ID NO: 23367 - protein, 14 aa, Severe acute respiratory syndrome-related coronavirus
  REGION 1..14: note = Table B: HLA-DQA1*05:05-B1*03:19L
  source 1..14: note = Severe acute respiratory syndrome coronavirus 2
FGMSRIGMEVTPSG

SEQ ID NO: 23368 - protein, 13 aa, Severe acute respiratory syndrome-related coronavirus
  REGION 1..13: note = Table B: HLA-DQA1*05:05-B1*03:19L HLA-DQA1*05:05-B1*03:01L HLA-DRB1*15:03L
  source 1..13: note = Severe acute respiratory syndrome coronavirus 2
DLDDFSKQLQQSM

SEQ ID NO: 23369 - protein, 11 aa, Severe acute respiratory syndrome-related coronavirus
  REGION 1..11: note = Table B: HLA-DQA1*05:05-B1*03:19L
  source 1..11: note = Severe acute respiratory syndrome coronavirus 2
YINVFAFPFTI

SEQ ID NO: 23370 - protein, 12 aa, Severe acute respiratory syndrome-related coronavirus
  REGION 1..12: note = Table B: HLA-DRB4*02:01NL HLA-DPA1*01:03-B1*02:01L
  source 1..12: note = Severe acute respiratory syndrome coronavirus 2
AGIFGADPIHSL

SEQ ID NO: 23371 - protein, 14 aa, Severe acute respiratory syndrome-related coronavirus
  REGION 1..14: note = Table B: HLA-DRB4*02:01NL HLA-DRB1*13:01L HLA-DPA1*01:03-B1*02:01L HLA-DRB1*08:02L HLA-DRB1*15:01L
  source 1..14: note = Severe acute respiratory syndrome coronavirus 2
LNGYTVEEAKTVLK

SEQ ID NO: 23372 - protein, 15 aa, Severe acute respiratory syndrome-related coronavirus
  REGION 1..15: note = Table B: HLA-DRB4*02:01NL
  source 1..15: note = Severe acute respiratory syndrome coronavirus 2
GARFYFYTSKTTVAS

SEQ ID NO: 23373 - protein, 14 aa, Severe acute respiratory syndrome-related coronavirus
  REGION 1..14: note = Table B: HLA-DRB4*02:01NL HLA-DQA1*05:05-B1*03:116L
  source 1..14: note = Severe acute respiratory syndrome coronavirus 2
NINLHTQVVDMSMT

SEQ ID NO: 23374 - protein, 12 aa, Severe acute respiratory syndrome-related coronavirus
  REGION 1..12: note = Table B: HLA-DRB4*02:01NL HLA-DRB4*01:01L HLA-DRB1*15:01L
  source 1..12: note = Severe acute respiratory syndrome coronavirus 2
AAYVDNSSLTIK

SEQ ID NO: 23375 - protein, 14 aa, Severe acute respiratory syndrome-related coronavirus
  REGION 1..14: note = Table B: HLA-DRB4*02:01NL HLA-DRB1*13:01L HLA-DRB4*01:01L HLA-DRB1*15:01L
  source 1..14: note = Severe acute respiratory syndrome coronavirus 2
AYVDNSSLTIKKPN

SEQ ID NO: 23376 - protein, 13 aa, Severe acute respiratory syndrome-related coronavirus
  REGION 1..13: note = Table B: HLA-DRB4*02:01NL HLA-DRB1*07:01L HLA-DRB1*15:01L
  source 1..13: note = Severe acute respiratory syndrome coronavirus 2
VYAADPAMHAASG

SEQ ID NO: 23377 - protein, 12 aa, Severe acute respiratory syndrome-related coronavirus
  REGION 1..12: note = Table B: HLA-DRB4*02:01NL HLA-DRB3*01:01L
  source 1..12: note = Severe acute respiratory syndrome coronavirus 2
NALLSTDGNKIA

SEQ ID NO: 23378 - protein, 15 aa, Severe acute respiratory syndrome-related coronavirus
  REGION 1..15: note = Table B: HLA-DRB4*02:01NL
  source 1..15: note = Severe acute respiratory syndrome coronavirus 2
VASKILGLPTQTVDS

SEQ ID NO: 23379 - protein, 15 aa, Severe acute respiratory syndrome-related coronavirus
  REGION 1..15: note = Table B: HLA-DRB4*02:01NL HLA-DRB1*13:01L HLA-DPA1*01:03-B1*02:01L HLA-DRB1*15:01L
  source 1..15: note = Severe acute respiratory syndrome coronavirus 2
GVLITEGSVKGLQPS

SEQ ID NO: 23380 - protein, 15 aa, Severe acute respiratory syndrome-related coronavirus
  REGION 1..15: note = Table B: HLA-DRB4*02:01NL HLA-DPA1*01:03-B1*04:01L HLA-DRB1*15:01L
  source 1..15: note = Severe acute respiratory syndrome coronavirus 2
SFVIRGDEVRQIAPG

SEQ ID NO: 23381 - protein, 14 aa, Severe acute respiratory syndrome-related coronavirus
  REGION 1..14: note = Table B: HLA-DRB4*02:01NL HLA-DPA1*01:03-B1*02:01L HLA-DRB1*08:02L HLA-DRB1*15:01L
  source 1..14: note = Severe acute respiratory syndrome coronavirus 2
LKPFERDISTEIYQ

SEQ ID NO: 23382 - protein, 16 aa, Severe acute respiratory syndrome-related coronavirus
  REGION 1..16: note = Table B: HLA-DRB4*02:01NL
  source 1..16: note = Severe acute respiratory syndrome coronavirus 2
GGFNFSQILPDPSKPS

SEQ ID NO: 23383 - protein, 15 aa, Severe acute respiratory syndrome-related coronavirus
  REGION 1..15: note = Table B: HLA-DRB4*02:01NL HLA-DQA1*05:05-B1*03:116L HLA-DRB1*15:01L
  source 1..15: note = Severe acute respiratory syndrome coronavirus 2
IEDLLFNKVTLADAG

SEQ ID NO: 23384 - protein, 13 aa, Severe acute respiratory syndrome-related coronavirus
  REGION 1..13: note = Table B: HLA-DRB4*02:01NL
  source 1..13: note = Severe acute respiratory syndrome coronavirus 2
IDGSSGVVNPVME

SEQ ID NO: 23385 - protein, 14 aa, Severe acute respiratory syndrome-related coronavirus
  REGION 1..14: note = Table B: HLA-DRB4*02:01NL
  source 1..14: note = Severe acute respiratory syndrome coronavirus 2
SRNYIAQVDVVNFN

SEQ ID NO: 23386 - protein, 15 aa, Severe acute respiratory syndrome-related coronavirus
  REGION 1..15: note = Table B: HLA-DRB5*02:02L
  source 1..15: note = Severe acute respiratory syndrome coronavirus 2
SDDYIATNGPLKVGG

SEQ ID NO: 23387 - protein, 15 aa, Severe acute respiratory syndrome-related coronavirus
  REGION 1..15: note = Table B: HLA-DRB5*02:02L
  source 1..15: note = Severe acute respiratory syndrome coronavirus 2
AGSTFISDEVARDLS

SEQ ID NO: 23388 - protein, 13 aa, Severe acute respiratory syndrome-related coronavirus
  REGION 1..13: note = Table B: HLA-DRB5*02:02L
  source 1..13: note = Severe acute respiratory syndrome coronavirus 2
VSDVGDSAEVAVK

SEQ ID NO: 23389 - protein, 16 aa, Severe acute respiratory syndrome-related coronavirus
  REGION 1..16: note = Table B: HLA-DRB5*02:02L HLA-DRB1*15:01L
  source 1..16: note = Severe acute respiratory syndrome coronavirus 2
IQQVVDADSKIVQLSE

SEQ ID NO: 23390 - protein, 18 aa, Severe acute respiratory syndrome-related coronavirus
  REGION 1..18: note = Table B: HLA-DRB5*02:02L
  source 1..18: note = Severe acute respiratory syndrome coronavirus 2
DFGDFIQTTPGSGVPVVD

SEQ ID NO: 23391 - protein, 14 aa, Severe acute respiratory syndrome-related coronavirus
  REGION 1..14: note = Table B: HLA-DRB5*02:02L
  source 1..14: note = Severe acute respiratory syndrome coronavirus 2
ISDEFSSNVANYQK

SEQ ID NO: 23392 - protein, 15 aa, Severe acute respiratory syndrome-related coronavirus
  REGION 1..15: note = Table B: HLA-DRB5*02:02L HLA-DQA1*05:05-B1*03:116L
  source 1..15: note = Severe acute respiratory syndrome coronavirus 2
EPQIITTDNTFVSGN

SEQ ID NO: 23393 - protein, 14 aa, Severe acute respiratory syndrome-related coronavirus
  REGION 1..14: note = Table B: HLA-DRB5*02:02L
  source 1..14: note = Severe acute respiratory syndrome coronavirus 2
PSDFVRATATIPIQ

SEQ ID NO: 23394 - protein, 14 aa, Severe acute respiratory syndrome-related coronavirus
  REGION 1..14: note = Table B: HLA-DRB5*02:02L
  source 1..14: note = Severe acute respiratory syndrome coronavirus 2
DFVRATATIPIQAS

SEQ ID NO: 23395 - protein, 16 aa, Severe acute respiratory syndrome-related coronavirus
  REGION 1..16: note = Table B: HLA-DRB5*02:02L HLA-DQA1*05:05-B1*03:116L
  source 1..16: note = Severe acute respiratory syndrome coronavirus 2
TGAIKLDDKDPNFKDQ

SEQ ID NO: 23396 - protein, 11 aa, Severe acute respiratory syndrome-related coronavirus
  REGION 1..11: note = Table B: HLA-DQA1*05:01-B1*02:01L HLA-DQA1*01:03-B1*06:01L
  source 1..11: note = Severe acute respiratory syndrome coronavirus 2
VELVAELEGIQ

SEQ ID NO: 23397 - protein, 11 aa, Severe acute respiratory syndrome-related coronavirus
  REGION 1..11: note = Table B: HLA-DQA1*05:01-B1*02:01L HLA-DRB1*16:01L HLA-DQA1*01:03-B1*06:01L HLA-DQA1*02:01-B1*03:03L
  source 1..11: note = Severe acute respiratory syndrome coronavirus 2
ADLKSFDLGDE

SEQ ID NO: 23398 - protein, 12 aa, Severe acute respiratory syndrome-related coronavirus
  REGION 1..12: note = Table B: HLA-DQA1*05:01-B1*02:01L
  source 1..12: note = Severe acute respiratory syndrome coronavirus 2
DLKSFDLGDELG

SEQ ID NO: 23399 - protein, 14 aa, Severe acute respiratory syndrome-related coronavirus
  REGION 1..14: note = Table B: HLA-DQA1*05:01-B1*02:01L
  source 1..14: note = Severe acute respiratory syndrome coronavirus 2
LKSFDLGDELGTDP

SEQ ID NO: 23400 - protein, 11 aa, Severe acute respiratory syndrome-related coronavirus
  REGION 1..11: note = Table B: HLA-DQA1*05:01-B1*02:01L HLA-DQA1*03:01-B1*03:02L
  source 1..11: note = Severe acute respiratory syndrome coronavirus 2
GDELGTDPYED

SEQ ID NO: 23401 - protein, 11 aa, Severe acute respiratory syndrome-related coronavirus
  REGION 1..11: note = Table B: HLA-DQA1*05:01-B1*02:01L
  source 1..11: note = Severe acute respiratory syndrome coronavirus 2
DPYEDFQENWN

SEQ ID NO: 23402 - protein, 11 aa, Severe acute respiratory syndrome-related coronavirus
  REGION 1..11: note = Table B: HLA-DQA1*05:01-B1*02:01L HLA-DRB1*12:01L HLA-DPA1*03:01-B1*105:01L
  source 1..11: note = Severe acute respiratory syndrome coronavirus 2
GAYTRYVDNNF

SEQ ID NO: 23403 - protein, 12 aa, Severe acute respiratory syndrome-related coronavirus
  REGION 1..12: note = Table B: HLA-DQA1*05:01-B1*02:01L
  source 1..12: note = Severe acute respiratory syndrome coronavirus 2
FDTFNGECPNFV

SEQ ID NO: 23404 - protein, 12 aa, Severe acute respiratory syndrome-related coronavirus
  REGION 1..12: note = Table B: HLA-DQA1*05:01-B1*02:01L HLA-DPA1*03:01-B1*105:01L
  source 1..12: note = Severe acute respiratory syndrome coronavirus 2
HTGVVGEGSEGL

SEQ ID NO: 23405 - protein, 11 aa, Severe acute respiratory syndrome-related coronavirus
  REGION 1..11: note = Table B: HLA-DQA1*05:01-B1*02:01L
  source 1..11: note = Severe acute respiratory syndrome coronavirus 2
GVVGEGSEGLN

SEQ ID NO: 23406 - protein, 12 aa, Severe acute respiratory syndrome-related coronavirus
  REGION 1..12: note = Table B: HLA-DQA1*05:01-B1*02:01L
  source 1..12: note = Severe acute respiratory syndrome coronavirus 2
VGEGSEGLNDNL

SEQ ID NO: 23407 - protein, 11 aa, Severe acute respiratory syndrome-related coronavirus
  REGION 1..11: note = Table B: HLA-DQA1*05:01-B1*02:01L HLA-DQA1*03:01-B1*03:02L
  source 1..11: note = Severe acute respiratory syndrome coronavirus 2
EGSEGLNDNLL

SEQ ID NO: 23408 - protein, 11 aa, Severe acute respiratory syndrome-related coronavirus
  REGION 1..11: note = Table B: HLA-DQA1*05:01-B1*02:01L
  source 1..11: note = Severe acute respiratory syndrome coronavirus 2
GSEGLNDNLLE

SEQ ID NO: 23409 - protein, 12 aa, Severe acute respiratory syndrome-related coronavirus
  REGION 1..12: note = Table B: HLA-DQA1*05:01-B1*02:01L
  source 1..12: note = Severe acute respiratory syndrome coronavirus 2
SEGLNDNLLEIL

SEQ ID NO: 23410 - protein, 11 aa, Severe acute respiratory syndrome-related coronavirus
  REGION 1..11: note = Table B: HLA-DQA1*05:01-B1*02:01L HLA-DPA1*03:01-B1*105:01L
  source 1..11: note = Severe acute respiratory syndrome coronavirus 2
SQYSLRLIDAM

SEQ ID NO: 23411 - protein, 10 aa, Severe acute respiratory syndrome-related coronavirus
  REGION 1..10: note = Table B: HLA-DQA1*05:01-B1*02:01L HLA-DPA1*03:01-B1*105:01L HLA-DQA1*03:01-B1*03:02L HLA-DQA1*01:03-B1*06:01L HLA-DQA1*02:01-B1*03:03L
  source 1..10: note = Severe acute respiratory syndrome coronavirus 2
MFTSDLATNN

SEQ ID NO: 23412 - protein, 12 aa, Severe acute respiratory syndrome-related coronavirus
  REGION 1..12: note = Table B: HLA-DQA1*05:01-B1*02:01L HLA-DPA1*03:01-B1*105:01L
  source 1..12: note = Severe acute respiratory syndrome coronavirus 2
GLLMPLKAPKEI

SEQ ID NO: 23413 - protein, 12 aa, Severe acute respiratory syndrome-related coronavirus
  REGION 1..12: note = Table B: HLA-DQA1*05:01-B1*02:01L HLA-DPA1*03:01-B1*105:01L
  source 1..12: note = Severe acute respiratory syndrome coronavirus 2
IFLEGETLPTEV

SEQ ID NO: 23414 - protein, 12 aa, Severe acute respiratory syndrome-related coronavirus
  REGION 1..12: note = Table B: HLA-DQA1*05:01-B1*02:01L
  source 1..12: note = Severe acute respiratory syndrome coronavirus 2
ETLPTEVLTEEV

SEQ ID NO: 23415 - protein, 12 aa, Severe acute respiratory syndrome-related coronavirus
  REGION 1..12: note = Table B: HLA-DQA1*05:01-B1*02:01L
  source 1..12: note = Severe acute respiratory syndrome coronavirus 2
APTKVTFGDDTV

SEQ ID NO: 23416 - protein, 11 aa, Severe acute respiratory syndrome-related coronavirus
  REGION 1..11: note = Table B: HLA-DQA1*05:01-B1*02:01L HLA-DQA1*03:01-B1*03:02L
  source 1..11: note = Severe acute respiratory syndrome coronavirus 2
FGDDTVIEVQG

SEQ ID NO: 23417 - protein, 11 aa, Severe acute respiratory syndrome-related coronavirus
  REGION 1..11: note = Table B: HLA-DQA1*05:01-B1*02:01L HLA-DRB1*12:01L HLA-DRB1*14:17L
  source 1..11: note = Severe acute respiratory syndrome coronavirus 2
EVQGYKSVNIT

SEQ ID NO: 23418 - protein, 11 aa, Severe acute respiratory syndrome-related coronavirus
  REGION 1..11: note = Table B: HLA-DQA1*05:01-B1*02:01L HLA-DPA1*03:01-B1*105:01L HLA-DQA1*02:01-B1*03:03L
  source 1..11: note = Severe acute respiratory syndrome coronavirus 2
AYTVELGTEVN

SEQ ID NO: 23419 - protein, 12 aa, Severe acute respiratory syndrome-related coronavirus
  REGION 1..12: note = Table B: HLA-DQA1*05:01-B1*02:01L HLA-DQA1*03:01-B1*03:02L
  source 1..12: note = Severe acute respiratory syndrome coronavirus 2
SFYPPDEDEEEG

SEQ ID NO: 23420 - protein, 15 aa, Severe acute respiratory syndrome-related coronavirus
  REGION 1..15: note = Table B: HLA-DQA1*05:01-B1*02:01L HLA-DQA1*03:01-B1*03:02L
  source 1..15: note = Severe acute respiratory syndrome coronavirus 2
YPPDEDEEEGDCEEE

SEQ ID NO: 23421 - protein, 17 aa, Severe acute respiratory syndrome-related coronavirus
  REGION 1..17: note = Table B: HLA-DQA1*05:01-B1*02:01L
  source 1..17: note = Severe acute respiratory syndrome coronavirus 2
PPDEDEEEGDCEEEEFE

SEQ ID NO: 23422 - protein, 14 aa, Severe acute respiratory syndrome-related coronavirus
  REGION 1..14: note = Table B: HLA-DQA1*05:01-B1*02:01L
  source 1..14: note = Severe acute respiratory syndrome coronavirus 2
DEEEGDCEEEEFEP

SEQ ID NO: 23423 - protein, 13 aa, Severe acute respiratory syndrome-related coronavirus
  REGION 1..13: note = Table B: HLA-DQA1*05:01-B1*02:01L
  source 1..13: note = Severe acute respiratory syndrome coronavirus 2
EEGDCEEEEFEPS

SEQ ID NO: 23424 - protein, 14 aa, Severe acute respiratory syndrome-related coronavirus
  REGION 1..14: note = Table B: HLA-DQA1*05:01-B1*02:01L
  source 1..14: note = Severe acute respiratory syndrome coronavirus 2
EGDCEEEEFEPSTQ

SEQ ID NO: 23425 - protein, 12 aa, Severe acute respiratory syndrome-related coronavirus
  REGION 1..12: note = Table B: HLA-DQA1*05:01-B1*02:01L HLA-DQA1*03:01-B1*03:02L
  source 1..12: note = Severe acute respiratory syndrome coronavirus 2
FEPSTQYEYGTE

SEQ ID NO: 23426 - protein, 10 aa, Severe acute respiratory syndrome-related coronavirus
  REGION 1..10: note = Table B: HLA-DQA1*05:01-B1*02:01L HLA-DQA1*03:01-B1*03:02L
  source 1..10: note = Severe acute respiratory syndrome coronavirus 2
AALQPEEEQE

SEQ ID NO: 23427 - protein, 10 aa, Severe acute respiratory syndrome-related coronavirus
  REGION 1..10: note = Table B: HLA-DQA1*05:01-B1*02:01L HLA-DQA1*03:01-B1*03:02L
  source 1..10: note = Severe acute respiratory syndrome coronavirus 2
ALQPEEEQEE

SEQ ID NO: 23428 - protein, 14 aa, Severe acute respiratory syndrome-related coronavirus
  REGION 1..14: note = Table B: HLA-DQA1*05:01-B1*02:01L
  source 1..14: note = Severe acute respiratory syndrome coronavirus 2
PEEEQEEDWLDDDS

SEQ ID NO: 23429 - protein, 12 aa, Severe acute respiratory syndrome-related coronavirus
  REGION 1..12: note = Table B: HLA-DQA1*05:01-B1*02:01L
  source 1..12: note = Severe acute respiratory syndrome coronavirus 2
EQEEDWLDDDSQ

SEQ ID NO: 23430 - protein, 12 aa, Severe acute respiratory syndrome-related coronavirus
  REGION 1..12: note = Table B: HLA-DQA1*05:01-B1*02:01L
  source 1..12: note = Severe acute respiratory syndrome coronavirus 2
QEEDWLDDDSQQ

SEQ ID NO: 23431 - protein, 12 aa, Severe acute respiratory syndrome-related coronavirus
  REGION 1..12: note = Table B: HLA-DQA1*05:01-B1*02:01L HLA-DQA1*03:01-B1*03:02L
  source 1..12: note = Severe acute respiratory syndrome coronavirus 2
EEDWLDDDSQQT

SEQ ID NO: 23432 - protein, 13 aa, Severe acute respiratory syndrome-related coronavirus
  REGION 1..13: note = Table B: HLA-DQA1*05:01-B1*02:01L
  source 1..13: note = Severe acute respiratory syndrome coronavirus 2
LDDDSQQTVGQQD

SEQ ID NO: 23433 - protein, 12 aa, Severe acute respiratory syndrome-related coronavirus
  REGION 1..12: note = Table B: HLA-DQA1*05:01-B1*02:01L HLA-DQA1*03:01-B1*03:02L HLA-DQA1*01:03-B1*06:01L
  source 1..12: note = Severe acute respiratory syndrome coronavirus 2
TDNVYIKNADIV

SEQ ID NO: 23434 - protein, 12 aa, Severe acute respiratory syndrome-related coronavirus
  REGION 1..12: note = Table B: HLA-DQA1*05:01-B1*02:01L
  source 1..12: note = Severe acute respiratory syndrome coronavirus 2
VESDDYIATNGP

SEQ ID NO: 23435 - protein, 11 aa, Severe acute respiratory syndrome-related coronavirus
  REGION 1..11: note = Table B: HLA-DQA1*05:01-B1*02:01L
  source 1..11: note = Severe acute respiratory syndrome coronavirus 2
SATLVSDIDIT

SEQ ID NO: 23436 - protein, 11 aa, Severe acute respiratory syndrome-related coronavirus
  REGION 1..11: note = Table B: HLA-DQA1*05:01-B1*02:01L HLA-DPA1*03:01-B1*105:01L
  source 1..11: note = Severe acute respiratory syndrome coronavirus 2
LVSDIDITFLK

SEQ ID NO: 23437 - protein, 12 aa, Severe acute respiratory syndrome-related coronavirus
  REGION 1..12: note = Table B: HLA-DQA1*05:01-B1*02:01L HLA-DPA1*03:01-B1*105:01L
  source 1..12: note = Severe acute respiratory syndrome coronavirus 2
PYIVGDVVQEGV

SEQ ID NO: 23438 - protein, 13 aa, Severe acute respiratory syndrome-related coronavirus
  REGION 1..13: note = Table B: HLA-DQA1*05:01-B1*02:01L HLA-DQA1*03:01-B1*03:02L HLA-DQA1*01:03-B1*06:01L
  source 1..13: note = Severe acute respiratory syndrome coronavirus 2
NDLNETLVTMPLG

SEQ ID NO: 23439 - protein, 11 aa, Severe acute respiratory syndrome-related coronavirus
  REGION 1..11: note = Table B: HLA-DQA1*05:01-B1*02:01L
  source 1..11: note = Severe acute respiratory syndrome coronavirus 2
TVSVSSPDAVT

SEQ ID NO: 23440 - protein, 11 aa, Severe acute respiratory syndrome-related coronavirus
  REGION 1..11: note = Table B: HLA-DQA1*05:01-B1*02:01L
  source 1..11: note = Severe acute respiratory syndrome coronavirus 2
TPEEHFIETIS

SEQ ID NO: 23441 - protein, 12 aa, Severe acute respiratory syndrome-related coronavirus
  REGION 1..12: note = Table B: HLA-DQA1*05:01-B1*02:01L HLA-DQA1*05:05-B1*03:01L HLA-DQA1*01:03-B1*06:01L
  source 1..12: note = Severe acute respiratory syndrome coronavirus 2
DWSYSGQSTQLG

SEQ ID NO: 23442 - protein, 12 aa, Severe acute respiratory syndrome-related coronavirus
  REGION 1..12: note = Table B: HLA-DQA1*05:01-B1*02:01L HLA-DQA1*03:01-B1*03:02L
  source 1..12: note = Severe acute respiratory syndrome coronavirus 2
SNPTTFHLDGEV

SEQ ID NO: 23443 - protein, 12 aa, Severe acute respiratory syndrome-related coronavirus
  REGION 1..12: note = Table B: HLA-DQA1*05:01-B1*02:01L HLA-DQA1*03:01-B1*03:02L
  source 1..12: note = Severe acute respiratory syndrome coronavirus 2
NPTTFHLDGEVI

SEQ ID NO: 23444 - protein, 13 aa, Severe acute respiratory syndrome-related coronavirus
  REGION 1..13: note = Table B: HLA-DQA1*05:01-B1*02:01L HLA-DPA1*03:01-B1*105:01L
  source 1..13: note = Severe acute respiratory syndrome coronavirus 2
LDGVVCTEIDPKL

SEQ ID NO: 23445 - protein, 11 aa, Severe acute respiratory syndrome-related coronavirus
  REGION 1..11: note = Table B: HLA-DQA1*05:01-B1*02:01L HLA-DPA1*01:03-B1*04:02L HLA-DRB1*16:01L
  source 1..11: note = Severe acute respiratory syndrome coronavirus 2
ELKVTFFPDLN

SEQ ID NO: 23446 - protein, 12 aa, Severe acute respiratory syndrome-related coronavirus
  REGION 1..12: note = Table B: HLA-DQA1*05:01-B1*02:01L HLA-DQA1*03:01-B1*03:02L
  source 1..12: note = Severe acute respiratory syndrome coronavirus 2
FPDLNGDVVAID

SEQ ID NO: 23447 - protein, 11 aa, Severe acute respiratory syndrome-related coronavirus
  REGION 1..11: note = Table B: HLA-DQA1*05:01-B1*02:01L
  source 1..11: note = Severe acute respiratory syndrome coronavirus 2
SEEVVENPTIQ

SEQ ID NO: 23448 - protein, 12 aa, Severe acute respiratory syndrome-related coronavirus
  REGION 1..12: note = Table B: HLA-DQA1*05:01-B1*02:01L
  source 1..12: note = Severe acute respiratory syndrome coronavirus 2
LAAVNSVPWDTI

SEQ ID NO: 23449 - protein, 11 aa, Severe acute respiratory syndrome-related coronavirus
  REGION 1..11: note = Table B: HLA-DQA1*05:01-B1*02:01L
  source 1..11: note = Severe acute respiratory syndrome coronavirus 2
DSVTVKNGSIH

SEQ ID NO: 23450 - protein, 12 aa, Severe acute respiratory syndrome-related coronavirus
  REGION 1..12: note = Table B: HLA-DQA1*05:01-B1*02:01L HLA-DQA1*03:01-B1*03:02L HLA-DQA1*01:03-B1*06:01L
  source 1..12: note = Severe acute respiratory syndrome coronavirus 2
NVKDFMSLSEQL

SEQ ID NO: 23451 - protein, 10 aa, Severe acute respiratory syndrome-related coronavirus
  REGION 1..10: note = Table B: HLA-DQA1*05:01-B1*02:01L HLA-DRB1*12:01L HLA-DRB1*16:01L HLA-DQA1*02:01-B1*03:03L HLA-DRB1*15:03L
  source 1..10: note = Severe acute respiratory syndrome coronavirus 2
ICYTPSKLIE

SEQ ID NO: 23452 - protein, 11 aa, Severe acute respiratory syndrome-related coronavirus
  REGION 1..11: note = Table B: HLA-DQA1*05:01-B1*02:01L HLA-DPA1*03:01-B1*105:01L HLA-DRB1*15:03L
  source 1..11: note = Severe acute respiratory syndrome coronavirus 2
LPGVYSVIYLY

SEQ ID NO: 23453 - protein, 13 aa, Severe acute respiratory syndrome-related coronavirus
  REGION 1..13: note = Table B: HLA-DQA1*05:01-B1*02:01L
  source 1..13: note = Severe acute respiratory syndrome coronavirus 2
TTTLNGLWLDDVV

SEQ ID NO: 23454 - protein, 12 aa, Severe acute respiratory syndrome-related coronavirus
  REGION 1..12: note = Table B: HLA-DQA1*05:01-B1*02:01L HLA-DQA1*01:03-B1*06:01L
  source 1..12: note = Severe acute respiratory syndrome coronavirus 2
DLEGNFYGPFVD

SEQ ID NO: 23455 - protein, 12 aa, Severe acute respiratory syndrome-related coronavirus
  REGION 1..12: note = Table B: HLA-DQA1*05:01-B1*02:01L HLA-DPA1*03:01-B1*105:01L HLA-DRB1*15:03L
  source 1..12: note = Severe acute respiratory syndrome coronavirus 2
NFYGPFVDRQTA

SEQ ID NO: 23456 - protein, 13 aa, Severe acute respiratory syndrome-related coronavirus
  REGION 1..13: note = Table B: HLA-DQA1*05:01-B1*02:01L
  source 1..13: note = Severe acute respiratory syndrome coronavirus 2
PLTQDHVDILGPL

SEQ ID NO: 23457 - protein, 11 aa, Severe acute respiratory syndrome-related coronavirus
  REGION 1..11: note = Table B: HLA-DQA1*05:01-B1*02:01L HLA-DRB4*01:01L HLA-DRB1*12:01L HLA-DQA1*02:01-B1*03:03L
  source 1..11: note = Severe acute respiratory syndrome coronavirus 2
SLLVLVQSTQW

SEQ ID NO: 23458 - protein, 10 aa, Severe acute respiratory syndrome-related coronavirus
  REGION 1..10: note = Table B: HLA-DQA1*05:01-B1*02:01L HLA-DRB1*12:01L HLA-DRB1*15:03L
  source 1..10: note = Severe acute respiratory syndrome coronavirus 2
GIIAMSAFAM

SEQ ID NO: 23459 - protein, 13 aa, Severe acute respiratory syndrome-related coronavirus
  REGION 1..13: note = Table B: HLA-DQA1*05:01-B1*02:01L HLA-DPA1*01:03-B1*04:02L HLA-DRB1*15:03L
  source 1..13: note = Severe acute respiratory syndrome coronavirus 2
VAYFNMVYMPASW

SEQ ID NO: 23460 - protein, 13 aa, Severe acute respiratory syndrome-related coronavirus
  REGION 1..13: note = Table B: HLA-DQA1*05:01-B1*02:01L
  source 1..13: note = Severe acute respiratory syndrome coronavirus 2
FNMVYMPASWVMR

SEQ ID NO: 23461 - protein, 12 aa, Severe acute respiratory syndrome-related coronavirus
  REGION 1..12: note = Table B: HLA-DQA1*05:01-B1*02:01L HLA-DPA1*03:01-B1*105:01L
  source 1..12: note = Severe acute respiratory syndrome coronavirus 2
QQLRVESSSKLW

SEQ ID NO: 23462 - protein, 11 aa, Severe acute respiratory syndrome-related coronavirus
  REGION 1..11: note = Table B: HLA-DQA1*05:01-B1*02:01L HLA-DQA1*01:03-B1*06:01L
  source 1..11: note = Severe acute respiratory syndrome coronavirus 2
AKDTTEAFEKM

SEQ ID NO: 23463 - protein, 13 aa, Severe acute respiratory syndrome-related coronavirus
  REGION 1..13: note = Table B: HLA-DQA1*05:01-B1*02:01L HLA-DRB1*12:01L
  source 1..13: note = Severe acute respiratory syndrome coronavirus 2
GAVDINKLCEEML

SEQ ID NO: 23464 - protein, 11 aa, Severe acute respiratory syndrome-related coronavirus
  REGION 1..11: note = Table B: HLA-DQA1*05:01-B1*02:01L HLA-DPA1*01:02-B1*04:01L
  source 1..11: note = Severe acute respiratory syndrome coronavirus 2
VVIPDYNTYKN

SEQ ID NO: 23465 - protein, 10 aa, Severe acute respiratory syndrome-related coronavirus
  REGION 1..10: note = Table B: HLA-DQA1*05:01-B1*02:01L HLA-DRB1*12:01L HLA-DRB1*15:03L
  source 1..10: note = Severe acute respiratory syndrome coronavirus 2
IVQLSEISMD

SEQ ID NO: 23466 - protein, 11 aa, Severe acute respiratory syndrome-related coronavirus
  REGION 1..11: note = Table B: HLA-DQA1*05:01-B1*02:01L
  source 1..11: note = Severe acute respiratory syndrome coronavirus 2
EISMDNSPNLA

SEQ ID NO: 23467 - protein, 11 aa, Severe acute respiratory syndrome-related coronavirus
  REGION 1..11: note = Table B: HLA-DQA1*05:01-B1*02:01L
  source 1..11: note = Severe acute respiratory syndrome coronavirus 2
LQNNELSPVAL

SEQ ID NO: 23468 - protein, 10 aa, Severe acute respiratory syndrome-related coronavirus
  REGION 1..10: note = Table B: HLA-DQA1*05:01-B1*02:01L HLA-DQA1*03:01-B1*03:02L
  source 1..10: note = Severe acute respiratory syndrome coronavirus 2
AITVTPEANM

SEQ ID NO: 23469 - protein, 16 aa, Severe acute respiratory syndrome-related coronavirus
  REGION 1..16: note = Table B: HLA-DQA1*05:01-B1*02:01L HLA-DPA1*01:03-B1*04:01L
  source 1..16: note = Severe acute respiratory syndrome coronavirus 2
IDSYFVVKRHTFSNYQ

SEQ ID NO: 23470 - protein, 18 aa, Severe acute respiratory syndrome-related coronavirus
  REGION 1..18: note = Table B: HLA-DQA1*05:01-B1*02:01L HLA-DPA1*01:03-B1*104:01L
  source 1..18: note = Severe acute respiratory syndrome coronavirus 2
DSYFVVKRHTFSNYQHEE

SEQ ID NO: 23471 - protein, 16 aa, Severe acute respiratory syndrome-related coronavirus
  REGION 1..16: note = Table B: HLA-DQA1*05:01-B1*02:01L
  source 1..16: note = Severe acute respiratory syndrome coronavirus 2
FVVKRHTFSNYQHEET

SEQ ID NO: 23472 - protein, 17 aa, Severe acute respiratory syndrome-related coronavirus
  REGION 1..17: note = Table B: HLA-DQA1*05:01-B1*02:01L
  source 1..17: note = Severe acute respiratory syndrome coronavirus 2
IYNLLKDCPAVAKHDFF

SEQ ID NO: 23473 - protein, 11 aa, Severe acute respiratory syndrome-related coronavirus
  REGION 1..11: note = Table B: HLA-DQA1*05:01-B1*02:01L HLA-DQA1*03:01-B1*03:02L
  source 1..11: note = Severe acute respiratory syndrome coronavirus 2
KDWYDFVENPD

SEQ ID NO: 23474 - protein, 11 aa, Severe acute respiratory syndrome-related coronavirus
  REGION 1..11: note = Table B: HLA-DQA1*05:01-B1*02:01L
  source 1..11: note = Severe acute respiratory syndrome coronavirus 2
DWYDFVENPDI

SEQ ID NO: 23475 - protein, 14 aa, Severe acute respiratory syndrome-related coronavirus
  REGION 1..14: note = Table B: HLA-DQA1*05:01-B1*02:01L
  source 1..14: note = Severe acute respiratory syndrome coronavirus 2
NQDLNGNWYDFGDF

SEQ ID NO: 23476 - protein, 12 aa, Severe acute respiratory syndrome-related coronavirus
  REGION 1..12: note = Table B: HLA-DQA1*05:01-B1*02:01L
  source 1..12: note = Severe acute respiratory syndrome coronavirus 2
NGNWYDFGDFIQ

SEQ ID NO: 23477 - protein, 13 aa, Severe acute respiratory syndrome-related coronavirus
  REGION 1..13: note = Table B: HLA-DQA1*05:01-B1*02:01L HLA-DRB1*12:01L HLA-DRB1*15:03L
  source 1..13: note = Severe acute respiratory syndrome coronavirus 2
TLTRALTAESHVD

SEQ ID NO: 23478 - protein, 10 aa, Severe acute respiratory syndrome-related coronavirus
  REGION 1..10: note = Table B: HLA-DQA1*05:01-B1*02:01L HLA-DQA1*03:01-B1*03:02L HLA-DQA1*01:03-B1*06:01L HLA-DQA1*02:01-B1*03:03L
  source 1..10: note = Severe acute respiratory syndrome coronavirus 2
LTAESHVDTD

SEQ ID NO: 23479 - protein, 11 aa, Severe acute respiratory syndrome-related coronavirus
  REGION 1..11: note = Table B: HLA-DQA1*05:01-B1*02:01L
  source 1..11: note = Severe acute respiratory syndrome coronavirus 2
TAESHVDTDLT

SEQ ID NO: 23480 - protein, 15 aa, Severe acute respiratory syndrome-related coronavirus
  REGION 1..15: note = Table B: HLA-DQA1*05:01-B1*02:01L
  source 1..15: note = Severe acute respiratory syndrome coronavirus 2
KPYIKWDLLKYDFTE

SEQ ID NO: 23481 - protein, 11 aa, Severe acute respiratory syndrome-related coronavirus
  REGION 1..11: note = Table B: HLA-DQA1*05:01-B1*02:01L HLA-DPA1*01:03-B1*04:02L
  source 1..11: note = Severe acute respiratory syndrome coronavirus 2
GFFKEGSSVEL

SEQ ID NO: 23482 - protein, 11 aa, Severe acute respiratory syndrome-related coronavirus
  REGION 1..11: note = Table B: HLA-DQA1*05:01-B1*02:01L
  source 1..11: note = Severe acute respiratory syndrome coronavirus 2
YDYYRYNLPTM

SEQ ID NO: 23483 - protein, 11 aa, Severe acute respiratory syndrome-related coronavirus
  REGION 1..11: note = Table B: HLA-DQA1*05:01-B1*02:01L HLA-DQA1*01:03-B1*06:01L
  source 1..11: note = Severe acute respiratory syndrome coronavirus 2
NANQVIVNNLD

SEQ ID NO: 23484 - protein, 12 aa, Severe acute respiratory syndrome-related coronavirus
  REGION 1..12: note = Table B: HLA-DQA1*05:01-B1*02:01L HLA-DPA1*03:01-B1*105:01L
  source 1..12: note = Severe acute respiratory syndrome coronavirus 2
LYYDSMSYEDQD

SEQ ID NO: 23485 - protein, 11 aa, Severe acute respiratory syndrome-related coronavirus
  REGION 1..11: note = Table B: HLA-DQA1*05:01-B1*02:01L
  source 1..11: note = Severe acute respiratory syndrome coronavirus 2
YDSMSYEDQDA

SEQ ID NO: 23486 - protein, 14 aa, Severe acute respiratory syndrome-related coronavirus
  REGION 1..14: note = Table B: HLA-DQA1*05:01-B1*02:01L
  source 1..14: note = Severe acute respiratory syndrome coronavirus 2
VKPGGTSSGDATTA

SEQ ID NO: 23487 - protein, 17 aa, Severe acute respiratory syndrome-related coronavirus
  REGION 1..17: note = Table B: HLA-DQA1*05:01-B1*02:01L HLA-DPA1*01:03-B1*04:01L
  source 1..17: note = Severe acute respiratory syndrome coronavirus 2
GPHEFCSQHTMLVKQGD

SEQ ID NO: 23488 - protein, 14 aa, Severe acute respiratory syndrome-related coronavirus
  REGION 1..14: note = Table B: HLA-DQA1*05:01-B1*02:01L HLA-DRB1*16:01L HLA-DRB1*15:03L
  source 1..14: note = Severe acute respiratory syndrome coronavirus 2
GAGCFVDDIVKTDG

SEQ ID NO: 23489 - protein, 17 aa, Severe acute respiratory syndrome-related coronavirus
  REGION 1..17: note = Table B: HLA-DQA1*05:01-B1*02:01L HLA-DPA1*01:03-B1*04:02L HLA-DPA1*01:03-B1*104:01L
  source 1..17: note = Severe acute respiratory syndrome coronavirus 2
DHVISTSHKLVLSVNPY

SEQ ID NO: 23490 - protein, 11 aa, Severe acute respiratory syndrome-related coronavirus
  REGION 1..11: note = Table B: HLA-DQA1*05:01-B1*02:01L
  source 1..11: note = Severe acute respiratory syndrome coronavirus 2
VDALCEKALKY

SEQ ID NO: 23491 - protein, 12 aa, Severe acute respiratory syndrome-related coronavirus
  REGION 1..12: note = Table B: HLA-DQA1*05:01-B1*02:01L HLA-DQA1*01:03-B1*06:01L
  source 1..12: note = Severe acute respiratory syndrome coronavirus 2
TVNALPETTADI

SEQ ID NO: 23492 - protein, 12 aa, Severe acute respiratory syndrome-related coronavirus
  REGION 1..12: note = Table B: HLA-DQA1*05:01-B1*02:01L HLA-DQA1*03:01-B1*03:02L HLA-DQA1*02:01-B1*03:03L
  source 1..12: note = Severe acute respiratory syndrome coronavirus 2
TTADIVVFDEIS

SEQ ID NO: 23493 - protein, 11 aa, Severe acute respiratory syndrome-related coronavirus
  REGION 1..11: note = Table B: HLA-DQA1*05:01-B1*02:01L
  source 1..11: note = Severe acute respiratory syndrome coronavirus 2
TVSALVYDNKL

SEQ ID NO: 23494 - protein, 13 aa, Severe acute respiratory syndrome-related coronavirus
  REGION 1..13: note = Table B: HLA-DQA1*05:01-B1*02:01L HLA-DRB1*14:17L
  source 1..13: note = Severe acute respiratory syndrome coronavirus 2
FSTGVNLVAVPTG

SEQ ID NO: 23495 - protein, 12 aa, Severe acute respiratory syndrome-related coronavirus
  REGION 1..12: note = Table B: HLA-DQA1*05:01-B1*02:01L
  source 1..12: note = Severe acute respiratory syndrome coronavirus 2
PTGYVDTPNNTD

SEQ ID NO: 23496 - protein, 12 aa, Severe acute respiratory syndrome-related coronavirus
  REGION 1..12: note = Table B: HLA-DQA1*05:01-B1*02:01L
  source 1..12: note = Severe acute respiratory syndrome coronavirus 2
DTPNNTDFSRVS

SEQ ID NO: 23497 - protein, 17 aa, Severe acute respiratory syndrome-related coronavirus
  REGION 1..17: note = Table B: HLA-DQA1*05:01-B1*02:01L
  source 1..17: note = Severe acute respiratory syndrome coronavirus 2
GGSLYVNKHAFHTPAFD

SEQ ID NO: 23498 - protein, 12 aa, Severe acute respiratory syndrome-related coronavirus
  REGION 1..12: note = Table B: HLA-DQA1*05:01-B1*02:01L
  source 1..12: note = Severe acute respiratory syndrome coronavirus 2
TVFFDGRVDGQV

SEQ ID NO: 23499 - protein, 12 aa, Severe acute respiratory syndrome-related coronavirus
  REGION 1..12: note = Table B: HLA-DQA1*05:01-B1*02:01L
  source 1..12: note = Severe acute respiratory syndrome coronavirus 2
DSDLNDFVSDAD

SEQ ID NO: 23500 - protein, 12 aa, Severe acute respiratory syndrome-related coronavirus
  REGION 1..12: note = Table B: HLA-DQA1*05:01-B1*02:01L HLA-DQA1*03:01-B1*03:02L
  source 1..12: note = Severe acute respiratory syndrome coronavirus 2
DLNDFVSDADST

SEQ ID NO: 23501 - protein, 11 aa, Severe acute respiratory syndrome-related coronavirus
  REGION 1..11: note = Table B: HLA-DQA1*05:01-B1*02:01L HLA-DQA1*01:03-B1*06:01L
  source 1..11: note = Severe acute respiratory syndrome coronavirus 2
LKEGQINDMIL

SEQ ID NO: 23502 - protein, 11 aa, Severe acute respiratory syndrome-related coronavirus
  REGION 1..11: note = Table B: HLA-DQA1*05:01-B1*02:01L
  source 1..11: note = Severe acute respiratory syndrome coronavirus 2
TAGAAAYYVGY

SEQ ID NO: 23503 - protein, 13 aa, Severe acute respiratory syndrome-related coronavirus
  REGION 1..13: note = Table B: HLA-DQA1*05:01-B1*02:01L
  source 1..13: note = Severe acute respiratory syndrome coronavirus 2
TITDAVDCALDPL

SEQ ID NO: 23504 - protein, 12 aa, Severe acute respiratory syndrome-related coronavirus
  REGION 1..12: note = Table B: HLA-DQA1*05:01-B1*02:01L
  source 1..12: note = Severe acute respiratory syndrome coronavirus 2
QFGRDIADTTDA

SEQ ID NO: 23505 - protein, 13 aa, Severe acute respiratory syndrome-related coronavirus
  REGION 1..13: note = Table B: HLA-DQA1*05:01-B1*02:01L HLA-DRB1*04:08L
  source 1..13: note = Severe acute respiratory syndrome coronavirus 2
SVAYSNNSIAIPT

SEQ ID NO: 23506 - protein, 13 aa, Severe acute respiratory syndrome-related coronavirus
  REGION 1..13: note = Table B: HLA-DQA1*05:01-B1*02:01L
  source 1..13: note = Severe acute respiratory syndrome coronavirus 2
IPTNFTISVTTEI

SEQ ID NO: 23507 - protein, 19 aa, Severe acute respiratory syndrome-related coronavirus
  REGION 1..19: note = Table B: HLA-DQA1*05:01-B1*02:01L
  source 1..19: note = Severe acute respiratory syndrome coronavirus 2
LPDPSKPSKRSFIEDLLFN

SEQ ID NO: 23508 - protein, 12 aa, Severe acute respiratory syndrome-related coronavirus
  REGION 1..12: note = Table B: HLA-DQA1*05:01-B1*02:01L HLA-DRB1*12:01L HLA-DPA1*03:01-B1*105:01L HLA-DRB1*16:01L HLA-DRB1*15:03L
  source 1..12: note = Severe acute respiratory syndrome coronavirus 2
VTQNVLYENQKL

SEQ ID NO: 23509 - protein, 12 aa, Severe acute respiratory syndrome-related coronavirus
  REGION 1..12: note = Table B: HLA-DQA1*05:01-B1*02:01L HLA-DPA1*02:01-B1*13:01L
  source 1..12: note = Severe acute respiratory syndrome coronavirus 2
VTQRNFYEPQII

SEQ ID NO: 23510 - protein, 12 aa, Severe acute respiratory syndrome-related coronavirus
  REGION 1..12: note = Table B: HLA-DQA1*05:01-B1*02:01L HLA-DQA1*03:01-B1*03:02L HLA-DRB1*16:01L HLA-DRB1*15:03L
  source 1..12: note = Severe acute respiratory syndrome coronavirus 2
TQRNFYEPQIIT

SEQ ID NO: 23511 - protein, 11 aa, Severe acute respiratory syndrome-related coronavirus
  REGION 1..11: note = Table B: HLA-DQA1*05:01-B1*02:01L
  source 1..11: note = Severe acute respiratory syndrome coronavirus 2
IVNNTVYDPLQ

SEQ ID NO: 23512 - protein, 12 aa, Severe acute respiratory syndrome-related coronavirus
  REGION 1..12: note = Table B: HLA-DQA1*05:01-B1*02:01L HLA-DPA1*02:01-B1*13:01L HLA-DQA1*03:01-B1*03:02L
  source 1..12: note = Severe acute respiratory syndrome coronavirus 2
AKNLNESLIDLQ

SEQ ID NO: 23513 - protein, 12 aa, Severe acute respiratory syndrome-related coronavirus
  REGION 1..12: note = Table B: HLA-DQA1*05:01-B1*02:01L
  source 1..12: note = Severe acute respiratory syndrome coronavirus 2
NLNESLIDLQEL

SEQ ID NO: 23514 - protein, 11 aa, Severe acute respiratory syndrome-related coronavirus
  REGION 1..11: note = Table B: HLA-DQA1*05:01-B1*02:01L
  source 1..11: note = Severe acute respiratory syndrome coronavirus 2
SKNPLLYDANY

SEQ ID NO: 23515 - protein, 11 aa, Severe acute respiratory syndrome-related coronavirus
  REGION 1..11: note = Table B: HLA-DQA1*05:01-B1*02:01L
  source 1..11: note = Severe acute respiratory syndrome coronavirus 2
IPYNSVTSSIV

SEQ ID NO: 23516 - protein, 12 aa, Severe acute respiratory syndrome-related coronavirus
  REGION 1..12: note = Table B: HLA-DQA1*05:01-B1*02:01L
  source 1..12: note = Severe acute respiratory syndrome coronavirus 2
MEPIYDEPTTTT

SEQ ID NO: 23517 - protein, 12 aa, Severe acute respiratory syndrome-related coronavirus
  REGION 1..12: note = Table B: HLA-DQA1*05:01-B1*02:01L
  source 1..12: note = Severe acute respiratory syndrome coronavirus 2
SSSSDNIALLVQ

SEQ ID NO: 23518 - protein, 15 aa, Severe acute respiratory syndrome-related coronavirus
  REGION 1..15: note = Table B: HLA-DQA1*05:01-B1*02:01L
  source 1..15: note = Severe acute respiratory syndrome coronavirus 2
LIIMRTFKVSIWNLD

SEQ ID NO: 23519 - protein, 16 aa, Severe acute respiratory syndrome-related coronavirus
  REGION 1..16: note = Table B: HLA-DQA1*05:01-B1*02:01L HLA-DRB3*01:01L HLA-DPA1*02:01-B1*13:01L
  source 1..16: note = Severe acute respiratory syndrome coronavirus 2
APLIELCVDEAGSKSP

SEQ ID NO: 23520 - protein, 11 aa, Severe acute respiratory syndrome-related coronavirus
  REGION 1..11: note = Table B: HLA-DQA1*05:01-B1*02:01L HLA-DQA1*03:01-B1*03:02L HLA-DRB1*16:01L HLA-DQA1*02:01-B1*03:03L
  source 1..11: note = Severe acute respiratory syndrome coronavirus 2
LPYGANKDGII

SEQ ID NO: 23521 - protein, 13 aa, Severe acute respiratory syndrome-related coronavirus
  REGION 1..13: note = Table B: HLA-DQA1*05:01-B1*02:01L HLA-DRB1*14:54L HLA-DRB1*16:01L
  source 1..13: note = Severe acute respiratory syndrome coronavirus 2
SPARMAGNGGDAA

SEQ ID NO: 23522 - protein, 12 aa, Severe acute respiratory syndrome-related coronavirus
  REGION 1..12: note = Table B: HLA-DQA1*05:01-B1*02:01L HLA-DRB1*12:01L HLA-DPA1*03:01-B1*105:01L HLA-DPA1*01:02-B1*04:01L HLA-DRB1*15:03L
  source 1..12: note = Severe acute respiratory syndrome coronavirus 2
DAALALLLLDRL

SEQ ID NO: 23523 - protein, 12 aa, Severe acute respiratory syndrome-related coronavirus
  REGION 1..12: note = Table B: HLA-DQA1*05:01-B1*02:01L
  source 1..12: note = Severe acute respiratory syndrome coronavirus 2
QTVTLLPAADLD

SEQ ID NO: 23524 - protein, 14 aa, Severe acute respiratory syndrome-related coronavirus
  REGION 1..14: note = Table B: HLA-DRB1*13:01L HLA-DPA1*01:03-B1*02:01L HLA-DRB1*15:01L
  source 1..14: note = Severe acute respiratory syndrome coronavirus 2
EIAWYTERSEKSYE

SEQ ID NO: 23525 - protein, 14 aa, Severe acute respiratory syndrome-related coronavirus
  REGION 1..14: note = Table B: HLA-DRB1*13:01L
  source 1..14: note = Severe acute respiratory syndrome coronavirus 2
TSAFVETVKGLDYK

SEQ ID NO: 23526 - protein, 14 aa, Severe acute respiratory syndrome-related coronavirus
  REGION 1..14: note = Table B: HLA-DRB1*13:01L
  source 1..14: note = Severe acute respiratory syndrome coronavirus 2
IFSRTLETAQNSVR

SEQ ID NO: 23527 - protein, 14 aa, Severe acute respiratory syndrome-related coronavirus
  REGION 1..14: note = Table B: HLA-DRB1*13:01L HLA-DRB4*01:01L HLA-DRB1*04:10L HLA-DRB1*12:02L HLA-DRB1*15:01L
  source 1..14: note = Severe acute respiratory syndrome coronavirus 2
EGVEFLRDGWEIVK

SEQ ID NO: 23528 - protein, 14 aa, Severe acute respiratory syndrome-related coronavirus
  REGION 1..14: note = Table B: HLA-DRB1*13:01L HLA-DPA1*01:03-B1*02:01L
  source 1..14: note = Severe acute respiratory syndrome coronavirus 2
NVYLAVFDKNLYDK

SEQ ID NO: 23529 - protein, 16 aa, Severe acute respiratory syndrome-related coronavirus
  REGION 1..16: note = Table B: HLA-DRB1*13:01L HLA-DRB4*01:01L HLA-DPA1*01:03-B1*04:01L HLA-DQA1*05:05-B1*03:116L
  source 1..16: note = Severe acute respiratory syndrome coronavirus 2
VSSFLEMKSEKQVEQK

SEQ ID NO: 23530 - protein, 15 aa, Severe acute respiratory syndrome-related coronavirus
  REGION 1..15: note = Table B: HLA-DRB1*13:01L
  source 1..15: note = Severe acute respiratory syndrome coronavirus 2
VTTTLEETKFLTENL

SEQ ID NO: 23531 - protein, 14 aa, Severe acute respiratory syndrome-related coronavirus
  REGION 1..14: note = Table B: HLA-DRB1*13:01L
  source 1..14: note = Severe acute respiratory syndrome coronavirus 2
NGYTVEEAKTVLKK

SEQ ID NO: 23532 - protein, 15 aa, Severe acute respiratory syndrome-related coronavirus
  REGION 1..15: note = Table B: HLA-DRB1*13:01L HLA-DPA1*01:03-B1*02:01L HLA-DRB1*08:02L
  source 1..15: note = Severe acute respiratory syndrome coronavirus 2
SVYYTSNPTTFHLDG

SEQ ID NO: 23533 - protein, 14 aa, Severe acute respiratory syndrome-related coronavirus
  REGION 1..14: note = Table B: HLA-DRB1*13:01L
  source 1..14: note = Severe acute respiratory syndrome coronavirus 2
ENSYTTTIKPVTYK

SEQ ID NO: 23534 - protein, 14 aa, Severe acute respiratory syndrome-related coronavirus
  REGION 1..14: note = Table B: HLA-DRB1*13:01L HLA-DRB4*01:01L HLA-DPA1*01:03-B1*02:01L
  source 1..14: note = Severe acute respiratory syndrome coronavirus 2
VGDIILKPANNSLK

SEQ ID NO: 23535 - protein, 13 aa, Severe acute respiratory syndrome-related coronavirus
  REGION 1..13: note = Table B: HLA-DRB1*13:01L HLA-DPA1*01:03-B1*02:01L
  source 1..13: note = Severe acute respiratory syndrome coronavirus 2
MAAYVDNSSLTIK

SEQ ID NO: 23536 - protein, 12 aa, Severe acute respiratory syndrome-related coronavirus
  REGION 1..12: note = Table B: HLA-DRB1*13:01L
  source 1..12: note = Severe acute respiratory syndrome coronavirus 2
TFISDEVARDLS

SEQ ID NO: 23537 - protein, 16 aa, Severe acute respiratory syndrome-related coronavirus
  REGION 1..16: note = Table B: HLA-DRB1*13:01L HLA-DRB1*07:01L
  source 1..16: note = Severe acute respiratory syndrome coronavirus 2
IHLYFDKAGQKTYERH

SEQ ID NO: 23538 - protein, 14 aa, Severe acute respiratory syndrome-related coronavirus
  REGION 1..14: note = Table B: HLA-DRB1*13:01L HLA-DRB1*07:01L
  source 1..14: note = Severe acute respiratory syndrome coronavirus 2
RYLALYNKYKYFSG

SEQ ID NO: 23539 - protein, 14 aa, Severe acute respiratory syndrome-related coronavirus
  REGION 1..14: note = Table B: HLA-DRB1*13:01L HLA-DRB1*08:03L
  source 1..14: note = Severe acute respiratory syndrome coronavirus 2
LKLKVDTANPKTPK

SEQ ID NO: 23540 - protein, 17 aa, Severe acute respiratory syndrome-related coronavirus
  REGION 1..17: note = Table B: HLA-DRB1*13:01L HLA-DRB1*15:01L
  source 1..17: note = Severe acute respiratory syndrome coronavirus 2
NPKTPKYKFVRIQPGQT

SEQ ID NO: 23541 - protein, 15 aa, Severe acute respiratory syndrome-related coronavirus
  REGION 1..15: note = Table B: HLA-DRB1*13:01L
  source 1..15: note = Severe acute respiratory syndrome coronavirus 2
VYKVYYGNALDQAIS

SEQ ID NO: 23542 - protein, 18 aa, Severe acute respiratory syndrome-related coronavirus
  REGION 1..18: note = Table B: HLA-DRB1*13:01L
  source 1..18: note = Severe acute respiratory syndrome coronavirus 2
SIDAFKLNIKLLGVGGKP

SEQ ID NO: 23543 - protein, 16 aa, Severe acute respiratory syndrome-related coronavirus
  REGION 1..16: note = Table B: HLA-DRB1*13:01L
  source 1..16: note = Severe acute respiratory syndrome coronavirus 2
SEVVLKKLKKSLNVAK

SEQ ID NO: 23544 - protein, 16 aa, Severe acute respiratory syndrome-related coronavirus
  REGION 1..16: note = Table B: HLA-DRB1*13:01L HLA-DRB4*01:01L HLA-DPA1*01:03-B1*104:01L
  source 1..16: note = Severe acute respiratory syndrome coronavirus 2
LNNIINNARDGCVPLN

SEQ ID NO: 23545 - protein, 16 aa, Severe acute respiratory syndrome-related coronavirus
  REGION 1..16: note = Table B: HLA-DRB1*13:01L
  source 1..16: note = Severe acute respiratory syndrome coronavirus 2
DDNALAYYNTTKGGRF

SEQ ID NO: 23546 - protein, 14 aa, Severe acute respiratory syndrome-related coronavirus
  REGION 1..14: note = Table B: HLA-DRB1*13:01L
  source 1..14: note = Severe acute respiratory syndrome coronavirus 2
ALAYYNTTKGGRFV

SEQ ID NO: 23547 - protein, 14 aa, Severe acute respiratory syndrome-related coronavirus
  REGION 1..14: note = Table B: HLA-DRB1*13:01L
  source 1..14: note = Severe acute respiratory syndrome coronavirus 2
GDMVPHISRQRLTK

SEQ ID NO: 23548 - protein, 15 aa, Severe acute respiratory syndrome-related coronavirus
  REGION 1..15: note = Table B: HLA-DRB1*13:01L
  source 1..15: note = Severe acute respiratory syndrome coronavirus 2
SVLYYQNNVFMSEAK

SEQ ID NO: 23549 - protein, 15 aa, Severe acute respiratory syndrome-related coronavirus
  REGION 1..15: note = Table B: HLA-DRB1*13:01L
  source 1..15: note = Severe acute respiratory syndrome coronavirus 2
FDKFKVNSTLEQYVF

SEQ ID NO: 23550 - protein, 14 aa, Severe acute respiratory syndrome-related coronavirus
  REGION 1..14: note = Table B: HLA-DRB1*13:01L HLA-DRB4*01:01L HLA-DPA1*01:03-B1*04:01L HLA-DQA1*05:05-B1*03:116L
  source 1..14: note = Severe acute respiratory syndrome coronavirus 2
MGFKMNYQVNGYPN

SEQ ID NO: 23551 - protein, 18 aa, Severe acute respiratory syndrome-related coronavirus
  REGION 1..18: note = Table B: HLA-DRB1*13:01L
  source 1..18: note = Severe acute respiratory syndrome coronavirus 2
LPETYFTQSRNLQEFKPR

SEQ ID NO: 23552 - protein, 16 aa, Severe acute respiratory syndrome-related coronavirus
  REGION 1..16: note = Table B: HLA-DRB1*13:01L
  source 1..16: note = Severe acute respiratory syndrome coronavirus 2
MDEFIERYKLEGYAFE

SEQ ID NO: 23553 - protein, 13 aa, Severe acute respiratory syndrome-related coronavirus
  REGION 1..13: note = Table B: HLA-DRB1*13:01L HLA-DPA1*01:03-B1*04:02L HLA-DQA1*05:05-B1*03:01L HLA-DRB1*07:01L
  source 1..13: note = Severe acute respiratory syndrome coronavirus 2
NDFVSDADSTLIG

SEQ ID NO: 23554 - protein, 12 aa, Severe acute respiratory syndrome-related coronavirus
  REGION 1..12: note = Table B: HLA-DRB1*13:01L HLA-DPA1*01:03-B1*02:01L HLA-DPA1*01:03-B1*104:01L HLA-DRB1*08:02L
  source 1..12: note = Severe acute respiratory syndrome coronavirus 2
NYIFWRNTNPIQ

SEQ ID NO: 23555 - protein, 13 aa, Severe acute respiratory syndrome-related coronavirus
  REGION 1..13: note = Table B: HLA-DRB1*13:01L HLA-DPA1*01:03-B1*04:01L HLA-DPA1*01:03-B1*02:01L HLA-DRB1*08:02L
  source 1..13: note = Severe acute respiratory syndrome coronavirus 2
RGVYYPDKVFRSS

SEQ ID NO: 23556 - protein, 14 aa, Severe acute respiratory syndrome-related coronavirus
  REGION 1..14: note = Table B: HLA-DRB1*13:01L HLA-DPA1*01:03-B1*104:01L HLA-DRB1*08:02L
  source 1..14: note = Severe acute respiratory syndrome coronavirus 2
GVYYPDKVFRSSVL

SEQ ID NO: 23557 - protein, 14 aa, Severe acute respiratory syndrome-related coronavirus
  REGION 1..14: note = Table B: HLA-DRB1*13:01L
  source 1..14: note = Severe acute respiratory syndrome coronavirus 2
KGIYQTSNFRVQPT

SEQ ID NO: 23558 - protein, 14 aa, Severe acute respiratory syndrome-related coronavirus
  REGION 1..14: note = Table B: HLA-DRB1*13:01L
  source 1..14: note = Severe acute respiratory syndrome coronavirus 2
RFASVYAWNRKRIS

SEQ ID NO: 23559 - protein, 15 aa, Severe acute respiratory syndrome-related coronavirus
  REGION 1..15: note = Table B: HLA-DRB1*13:01L HLA-DRB1*08:03L
  source 1..15: note = Severe acute respiratory syndrome coronavirus 2
TGVLTESNKKFLPFQ

SEQ ID NO: 23560 - protein, 16 aa, Severe acute respiratory syndrome-related coronavirus
  REGION 1..16: note = Table B: HLA-DRB1*13:01L HLA-DRB1*07:01L
  source 1..16: note = Severe acute respiratory syndrome coronavirus 2
ADQLTPTWRVYSTGSN

SEQ ID NO: 23561 - protein, 16 aa, Severe acute respiratory syndrome-related coronavirus
  REGION 1..16: note = Table B: HLA-DRB1*13:01L HLA-DPA1*01:03-B1*04:02L HLA-DRB3*01:01L
  source 1..16: note = Severe acute respiratory syndrome coronavirus 2
AENSVAYSNNSIAIPT

SEQ ID NO: 23562 - protein, 14 aa, Severe acute respiratory syndrome-related coronavirus
  REGION 1..14: note = Table B: HLA-DRB1*13:01L HLA-DRB1*07:01L
  source 1..14: note = Severe acute respiratory syndrome coronavirus 2
KRSFIEDLLFNKVT

SEQ ID NO: 23563 - protein, 15 aa, Severe acute respiratory syndrome-related coronavirus
  REGION 1..15: note = Table B: HLA-DRB1*13:01L
  source 1..15: note = Severe acute respiratory syndrome coronavirus 2
LIDLQELGKYEQYIK

SEQ ID NO: 23564 - protein, 15 aa, Severe acute respiratory syndrome-related coronavirus
  REGION 1..15: note = Table B: HLA-DRB1*13:01L
  source 1..15: note = Severe acute respiratory syndrome coronavirus 2
TPSDFVRATATIPIQ

SEQ ID NO: 23565 - protein, 15 aa, Severe acute respiratory syndrome-related coronavirus
  REGION 1..15: note = Table B: HLA-DRB1*13:01L
  source 1..15: note = Severe acute respiratory syndrome coronavirus 2
LAVFQSASKIITLKK

SEQ ID NO: 23566 - protein, 14 aa, Severe acute respiratory syndrome-related coronavirus
  REGION 1..14: note = Table B: HLA-DRB1*13:01L
  source 1..14: note = Severe acute respiratory syndrome coronavirus 2
KIITLKKRWQLALS

SEQ ID NO: 23567 - protein, 16 aa, Severe acute respiratory syndrome-related coronavirus
  REGION 1..16: note = Table B: HLA-DRB1*13:01L HLA-DPA1*01:03-B1*04:01L HLA-DPA1*01:03-B1*104:01L
  source 1..16: note = Severe acute respiratory syndrome coronavirus 2
DSGFAAYSRYRIGNYK

SEQ ID NO: 23568 - protein, 14 aa, Severe acute respiratory syndrome-related coronavirus
  REGION 1..14: note = Table B: HLA-DRB1*13:01L
  source 1..14: note = Severe acute respiratory syndrome coronavirus 2
DQIGYYRRATRRIR

SEQ ID NO: 23569 - protein, 19 aa, Severe acute respiratory syndrome-related coronavirus
  REGION 1..19: note = Table B: HLA-DRB1*13:01L HLA-DRB1*12:02L
  source 1..19: note = Severe acute respiratory syndrome coronavirus 2
DDKDPNFKDQVILLNKHID

SEQ ID NO: 23570 - protein, 18 aa, Severe acute respiratory syndrome-related coronavirus
  REGION 1..18: note = Table B: HLA-DRB4*01:01L
  source 1..18: note = Severe acute respiratory syndrome coronavirus 2
DSVEEVLSEARQHLKDGT

SEQ ID NO: 23571 - protein, 18 aa, Severe acute respiratory syndrome-related coronavirus
  REGION 1..18: note = Table B: HLA-DRB4*01:01L HLA-DQA1*05:05-B1*03:116L
  source 1..18: note = Severe acute respiratory syndrome coronavirus 2
APNMMVTNNTFTLKGGAP

SEQ ID NO: 23572 - protein, 14 aa, Severe acute respiratory syndrome-related coronavirus
  REGION 1..14: note = Table B: HLA-DRB4*01:01L
  source 1..14: note = Severe acute respiratory syndrome coronavirus 2
LLLYIDINGNLHPD

SEQ ID NO: 23573 - protein, 14 aa, Severe acute respiratory syndrome-related coronavirus
  REGION 1..14: note = Table B: HLA-DRB4*01:01L HLA-DPA1*02:01-B1*13:01L
  source 1..14: note = Severe acute respiratory syndrome coronavirus 2
LLYIDINGNLHPDS

SEQ ID NO: 23574 - protein, 15 aa, Severe acute respiratory syndrome-related coronavirus
  REGION 1..15: note = Table B: HLA-DRB4*01:01L
  source 1..15: note = Severe acute respiratory syndrome coronavirus 2
IVGDVVQEGVLTAVV

SEQ ID NO: 23575 - protein, 14 aa, Severe acute respiratory syndrome-related coronavirus
  REGION 1..14: note = Table B: HLA-DRB4*01:01L
  source 1..14: note = Severe acute respiratory syndrome coronavirus 2
ASLINTLNDLNETL

SEQ ID NO: 23576 - protein, 14 aa, Severe acute respiratory syndrome-related coronavirus
  REGION 1..14: note = Table B: HLA-DRB4*01:01L
  source 1..14: note = Severe acute respiratory syndrome coronavirus 2
TFYVLPNDDTLRVE

SEQ ID NO: 23577 - protein, 18 aa, Severe acute respiratory syndrome-related coronavirus
  REGION 1..18: note = Table B: HLA-DRB4*01:01L HLA-DQA1*05:05-B1*03:116L HLA-DRB1*09:01L HLA-DQA1*05:05-B1*03:01L
  source 1..18: note = Severe acute respiratory syndrome coronavirus 2
LDNYYKKDNSYFTEQPID

SEQ ID NO: 23578 - protein, 17 aa, Severe acute respiratory syndrome-related coronavirus
  REGION 1..17: note = Table B: HLA-DRB4*01:01L HLA-DPA1*01:03-B1*04:01L HLA-DRB1*08:02L
  source 1..17: note = Severe acute respiratory syndrome coronavirus 2
DNFKFVCDNIKFADDLN

SEQ ID NO: 23579 - protein, 12 aa, Severe acute respiratory syndrome-related coronavirus
  REGION 1..12: note = Table B: HLA-DRB4*01:01L HLA-DRB1*12:02L
  source 1..12: note = Severe acute respiratory syndrome coronavirus 2
VVENPTIQKDVL

SEQ ID NO: 23580 - protein, 18 aa, Severe acute respiratory syndrome-related coronavirus
  REGION 1..18: note = Table B: HLA-DRB4*01:01L HLA-DRB1*08:02L
  source 1..18: note = Severe acute respiratory syndrome coronavirus 2
VPWDTIANYAKPFLNKVV

SEQ ID NO: 23581 - protein, 15 aa, Severe acute respiratory syndrome-related coronavirus
  REGION 1..15: note = Table B: HLA-DRB4*01:01L HLA-DPA1*01:03-B1*02:01L HLA-DRB1*08:02L
  source 1..15: note = Severe acute respiratory syndrome coronavirus 2
IINLVQMAPISAMVR

SEQ ID NO: 23582 - protein, 16 aa, Severe acute respiratory syndrome-related coronavirus
  REGION 1..16: note = Table B: HLA-DRB4*01:01L HLA-DPA1*02:01-B1*13:01L HLA-DRB1*08:02L
  source 1..16: note = Severe acute respiratory syndrome coronavirus 2
LPINVIVFDGKSKCEE

SEQ ID NO: 23583 - protein, 16 aa, Severe acute respiratory syndrome-related coronavirus
  REGION 1..16: note = Table B: HLA-DRB4*01:01L HLA-DQA1*05:05-B1*03:116L
  source 1..16: note = Severe acute respiratory syndrome coronavirus 2
NYMLTYNKVENMTPRD

SEQ ID NO: 23584 - protein, 15 aa, Severe acute respiratory syndrome-related coronavirus
  REGION 1..15: note = Table B: HLA-DRB4*01:01L HLA-DRB1*15:01L
  source 1..15: note = Severe acute respiratory syndrome coronavirus 2
ASEFSSLPSYAAFAT

SEQ ID NO: 23585 - protein, 16 aa, Severe acute respiratory syndrome-related coronavirus
  REGION 1..16: note = Table B: HLA-DRB4*01:01L HLA-DPA1*01:03-B1*104:01L HLA-DRB1*08:02L
  source 1..16: note = Severe acute respiratory syndrome coronavirus 2
KKSLNVAKSEFDRDAA

SEQ ID NO: 23586 - protein, 16 aa, Severe acute respiratory syndrome-related coronavirus
  REGION 1..16: note = Table B: HLA-DRB4*01:01L
  source 1..16: note = Severe acute respiratory syndrome coronavirus 2
AKSEFDRDAAMQRKLE

SEQ ID NO: 23587 - protein, 18 aa, Severe acute respiratory syndrome-related coronavirus
  REGION 1..18: note = Table B: HLA-DRB4*01:01L
  source 1..18: note = Severe acute respiratory syndrome coronavirus 2
NPDILRVYANLGERVRQA

SEQ ID NO: 23588 - protein, 18 aa, Severe acute respiratory syndrome-related coronavirus
  REGION 1..18: note = Table B: HLA-DRB4*01:01L HLA-DPA1*01:03-B1*04:02L
  source 1..18: note = Severe acute respiratory syndrome coronavirus 2
PILTLTRALTAESHVDTD

SEQ ID NO: 23589 - protein, 16 aa, Severe acute respiratory syndrome-related coronavirus
  REGION 1..16: note = Table B: HLA-DRB4*01:01L HLA-DRB1*12:02L HLA-DRB1*14:17L HLA-DRB1*15:01L
  source 1..16: note = Severe acute respiratory syndrome coronavirus 2
DYDYYRYNLPTMCDIR

SEQ ID NO: 23590 - protein, 18 aa, Severe acute respiratory syndrome-related coronavirus
  REGION 1..18: note = Table B: HLA-DRB4*01:01L HLA-DRB1*09:01L
  source 1..18: note = Severe acute respiratory syndrome coronavirus 2
GGWHNMLKTVYSDVENPH

SEQ ID NO: 23591 - protein, 15 aa, Severe acute respiratory syndrome-related coronavirus
  REGION 1..15: note = Table B: HLA-DRB4*01:01L HLA-DPA1*01:03-B1*104:01L
  source 1..15: note = Severe acute respiratory syndrome coronavirus 2
LDMYSVMLTNDNTSR

SEQ ID NO: 23592 - protein, 17 aa, Severe acute respiratory syndrome-related coronavirus
  REGION 1..17: note = Table B: HLA-DRB4*01:01L HLA-DQA1*05:05-B1*03:116L
  source 1..17: note = Severe acute respiratory syndrome coronavirus 2
SHKLVLSVNPYVCNAPG

SEQ ID NO: 23593 - protein, 18 aa, Severe acute respiratory syndrome-related coronavirus
  REGION 1..18: note = Table B: HLA-DRB4*01:01L HLA-DQA1*05:05-B1*03:116L
  source 1..18: note = Severe acute respiratory syndrome coronavirus 2
ANGQVFGLYKNTCVGSDN

SEQ ID NO: 23594 - protein, 17 aa, Severe acute respiratory syndrome-related coronavirus
  REGION 1..17: note = Table B: HLA-DRB4*01:01L HLA-DQA1*05:05-B1*03:116L HLA-DPA1*01:03-B1*02:01L
  source 1..17: note = Severe acute respiratory syndrome coronavirus 2
TGYRVTKNSKVQIGEYT

SEQ ID NO: 23595 - protein, 17 aa, Severe acute respiratory syndrome-related coronavirus
  REGION 1..17: note = Table B: HLA-DRB4*01:01L HLA-DRB1*08:02L
  source 1..17: note = Severe acute respiratory syndrome coronavirus 2
DYFVLTSHTVMPLSAPT

SEQ ID NO: 23596 - protein, 14 aa, Severe acute respiratory syndrome-related coronavirus
  REGION 1..14: note = Table B: HLA-DRB4*01:01L HLA-DPA1*01:03-B1*04:02L HLA-DPA1*01:03-B1*104:01L HLA-DRB1*08:02L
  source 1..14: note = Severe acute respiratory syndrome coronavirus 2
AKHYVYIGDPAQLP

SEQ ID NO: 23597 - protein, 18 aa, Severe acute respiratory syndrome-related coronavirus
  REGION 1..18: note = Table B: HLA-DRB4*01:01L
  source 1..18: note = Severe acute respiratory syndrome coronavirus 2
ADVEWKFYDAQPCSDKAY

SEQ ID NO: 23598 - protein, 16 aa, Severe acute respiratory syndrome-related coronavirus
  REGION 1..16: note = Table B: HLA-DRB4*01:01L
  source 1..16: note = Severe acute respiratory syndrome coronavirus 2
LENVAFNVVNKGHFDG

SEQ ID NO: 23599 - protein, 15 aa, Severe acute respiratory syndrome-related coronavirus
  REGION 1..15: note = Table B: HLA-DRB4*01:01L HLA-DPA1*01:03-B1*02:01L HLA-DPA1*01:03-B1*104:01L
  source 1..15: note = Severe acute respiratory syndrome coronavirus 2
VIWDYKRDAPAHIST

SEQ ID NO: 23600 - protein, 13 aa, Severe acute respiratory syndrome-related coronavirus
  REGION 1..13: note = Table B: HLA-DRB4*01:01L
  source 1..13: note = Severe acute respiratory syndrome coronavirus 2
YIFWRNTNPIQLS

SEQ ID NO: 23601 - protein, 18 aa, Severe acute respiratory syndrome-related coronavirus
  REGION 1..18: note = Table B: HLA-DRB4*01:01L
  source 1..18: note = Severe acute respiratory syndrome coronavirus 2
SKGRLIIRENNRVVISSD

SEQ ID NO: 23602 - protein, 15 aa, Severe acute respiratory syndrome-related coronavirus
  REGION 1..15: note = Table B: HLA-DRB4*01:01L HLA-DPA1*01:03-B1*02:01L HLA-DRB1*08:03L
  source 1..15: note = Severe acute respiratory syndrome coronavirus 2
SEFRVYSSANNCTFE

SEQ ID NO: 23603 - protein, 14 aa, Severe acute respiratory syndrome-related coronavirus
  REGION 1..14: note = Table B: HLA-DRB4*01:01L
  source 1..14: note = Severe acute respiratory syndrome coronavirus 2
TSNFRVQPTESIVR

SEQ ID NO: 23604 - protein, 16 aa, Severe acute respiratory syndrome-related coronavirus
  REGION 1..16: note = Table B: HLA-DRB4*01:01L
  source 1..16: note = Severe acute respiratory syndrome coronavirus 2
SNFRVQPTESIVRFPN

SEQ ID NO: 23605 - protein, 13 aa, Severe acute respiratory syndrome-related coronavirus
  REGION 1..13: note = Table B: HLA-DRB4*01:01L HLA-DPA1*01:03-B1*04:02L HLA-DPA1*01:03-B1*104:01L
  source 1..13: note = Severe acute respiratory syndrome coronavirus 2
VADYSVLYNSASF

SEQ ID NO: 23606 - protein, 16 aa, Severe acute respiratory syndrome-related coronavirus
  REGION 1..16: note = Table B: HLA-DRB4*01:01L HLA-DPA1*01:03-B1*02:01L
  source 1..16: note = Severe acute respiratory syndrome coronavirus 2
VTTEILPVSMTKTSVD

SEQ ID NO: 23607 - protein, 14 aa, Severe acute respiratory syndrome-related coronavirus
  REGION 1..14: note = Table B: HLA-DRB4*01:01L
  source 1..14: note = Severe acute respiratory syndrome coronavirus 2
NTLVKQLSSNFGAI

SEQ ID NO: 23608 - protein, 14 aa, Severe acute respiratory syndrome-related coronavirus
  REGION 1..14: note = Table B: HLA-DRB4*01:01L HLA-DRB1*09:01L HLA-DPA1*01:03-B1*104:01L
  source 1..14: note = Severe acute respiratory syndrome coronavirus 2
FFIYNKIVDEPEEH

SEQ ID NO: 23609 - protein, 18 aa, Severe acute respiratory syndrome-related coronavirus
  REGION 1..18: note = Table B: HLA-DRB4*01:01L
  source 1..18: note = Severe acute respiratory syndrome coronavirus 2
TLSYYKLGASQRVAGDSG

SEQ ID NO: 23610 - protein, 11 aa, Severe acute respiratory syndrome-related coronavirus
  REGION 1..11: note = Table B: HLA-DRB4*01:01L
  source 1..11: note = Severe acute respiratory syndrome coronavirus 2
NLSKSLTENKY

SEQ ID NO: 23611 - protein, 16 aa, Severe acute respiratory syndrome-related coronavirus
  REGION 1..16: note = Table B: HLA-DRB4*01:01L
  source 1..16: note = Severe acute respiratory syndrome coronavirus 2
ENKYSQLDEEQPMEID

SEQ ID NO: 23612 - protein, 14 aa, Severe acute respiratory syndrome-related coronavirus
  REGION 1..14: note = Table B: HLA-DRB4*01:01L
  source 1..14: note = Severe acute respiratory syndrome coronavirus 2
FLEYHDVRVVLDFI

SEQ ID NO: 23613 - protein, 19 aa, Severe acute respiratory syndrome-related coronavirus
  REGION 1..19: note = Table B: HLA-DRB4*01:01L
  source 1..19: note = Severe acute respiratory syndrome coronavirus 2
PSGTWLTYTGAIKLDDKDP

SEQ ID NO: 23614 - protein, 11 aa, Severe acute respiratory syndrome-related coronavirus
  REGION 1..11: note = Table B: HLA-DPA1*01:03-B1*04:01L
  source 1..11: note = Severe acute respiratory syndrome coronavirus 2
TSWQTGDFVKA

SEQ ID NO: 23615 - protein, 16 aa, Severe acute respiratory syndrome-related coronavirus
  REGION 1..16: note = Table B: HLA-DPA1*01:03-B1*04:01L
  source 1..16: note = Severe acute respiratory syndrome coronavirus 2
NHTGVVGEGSEGLNDN

SEQ ID NO: 23616 - protein, 13 aa, Severe acute respiratory syndrome-related coronavirus
  REGION 1..13: note = Table B: HLA-DPA1*01:03-B1*04:01L HLA-DPA1*02:01-B1*13:01L
  source 1..13: note = Severe acute respiratory syndrome coronavirus 2
LVVMAYITGGVVQ

SEQ ID NO: 23617 - protein, 12 aa, Severe acute respiratory syndrome-related coronavirus
  REGION 1..12: note = Table B: HLA-DPA1*01:03-B1*04:01L HLA-DPA1*01:03-B1*04:02L HLA-DRB1*12:01L HLA-DPA1*03:01-B1*105:01L HLA-DPA1*01:02-B1*04:01L HLA-DRB1*16:01L HLA-DRB1*15:03L
  source 1..12: note = Severe acute respiratory syndrome coronavirus 2
GVEFLRDGWEIV

SEQ ID NO: 23618 - protein, 16 aa, Severe acute respiratory syndrome-related coronavirus
  REGION 1..16: note = Table B: HLA-DPA1*01:03-B1*04:01L HLA-DRB1*12:01L
  source 1..16: note = Severe acute respiratory syndrome coronavirus 2
LDEWSMATYYLFDESG

SEQ ID NO: 23619 - protein, 16 aa, Severe acute respiratory syndrome-related coronavirus
  REGION 1..16: note = Table B: HLA-DPA1*01:03-B1*04:01L HLA-DRB1*15:01L
  source 1..16: note = Severe acute respiratory syndrome coronavirus 2
YKGIKIQEGVVDYGAR

SEQ ID NO: 23620 - protein, 19 aa, Severe acute respiratory syndrome-related coronavirus
  REGION 1..19: note = Table B: HLA-DPA1*01:03-B1*04:01L
  source 1..19: note = Severe acute respiratory syndrome coronavirus 2
PDAVTAYNGYLTSSSKTPE

SEQ ID NO: 23621 - protein, 19 aa, Severe acute respiratory syndrome-related coronavirus
  REGION 1..19: note = Table B: HLA-DPA1*01:03-B1*04:01L
  source 1..19: note = Severe acute respiratory syndrome coronavirus 2
KPHNSHEGKTFYVLPNDDT

SEQ ID NO: 23622 - protein, 11 aa, Severe acute respiratory syndrome-related coronavirus
  REGION 1..11: note = Table B: HLA-DPA1*01:03-B1*04:01L HLA-DRB1*16:01L
  source 1..11: note = Severe acute respiratory syndrome coronavirus 2
RELKVTFFPDL

SEQ ID NO: 23623 - protein, 13 aa, Severe acute respiratory syndrome-related coronavirus
  REGION 1..13: note = Table B: HLA-DPA1*01:03-B1*04:01L HLA-DRB1*16:01L HLA-DRB1*04:08L
  source 1..13: note = Severe acute respiratory syndrome coronavirus 2
SSFKWDLTAFGLV

SEQ ID NO: 23624 - protein, 12 aa, Severe acute respiratory syndrome-related coronavirus
  REGION 1..12: note = Table B: HLA-DPA1*01:03-B1*04:01L
  source 1..12: note = Severe acute respiratory syndrome coronavirus 2
AEWFLAYILFTR

SEQ ID NO: 23625 - protein, 11 aa, Severe acute respiratory syndrome-related coronavirus
  REGION 1..11: note = Table B: HLA-DPA1*01:03-B1*04:01L HLA-DPA1*01:03-B1*04:02L
  source 1..11: note = Severe acute respiratory syndrome coronavirus 2
ILFTRFFYVLG

SEQ ID NO: 23626 - protein, 11 aa, Severe acute respiratory syndrome-related coronavirus
  REGION 1..11: note = Table B: HLA-DPA1*01:03-B1*04:01L
  source 1..11: note = Severe acute respiratory syndrome coronavirus 2
SYFAVHFISNS

SEQ ID NO: 23627 - protein, 14 aa, Severe acute respiratory syndrome-related coronavirus
  REGION 1..14: note = Table B: HLA-DPA1*01:03-B1*04:01L HLA-DPA1*01:03-B1*02:01L HLA-DRB1*15:01L
  source 1..14: note = Severe acute respiratory syndrome coronavirus 2
QSSYIVDSVTVKNG

SEQ ID NO: 23628 - protein, 13 aa, Severe acute respiratory syndrome-related coronavirus
  REGION 1..13: note = Table B: HLA-DPA1*01:03-B1*04:01L HLA-DRB3*01:01L HLA-DPA1*01:03-B1*02:01L
  source 1..13: note = Severe acute respiratory syndrome coronavirus 2
YLTNDVSFLAHIQ

SEQ ID NO: 23629 - protein, 13 aa, Severe acute respiratory syndrome-related coronavirus
  REGION 1..13: note = Table B: HLA-DPA1*01:03-B1*04:01L HLA-DPA1*01:03-B1*04:02L HLA-DRB3*01:01L
  source 1..13: note = Severe acute respiratory syndrome coronavirus 2
TFLLNKEMYLKLR

SEQ ID NO: 23630 - protein, 14 aa, Severe acute respiratory syndrome-related coronavirus
  REGION 1..14: note = Table B: HLA-DPA1*01:03-B1*04:01L
  source 1..14: note = Severe acute respiratory syndrome coronavirus 2
LNPNYEDLLIRKSN

SEQ ID NO: 23631 - protein, 13 aa, Severe acute respiratory syndrome-related coronavirus
  REGION 1..13: note = Table B: HLA-DPA1*01:03-B1*04:01L HLA-DPA1*01:03-B1*04:02L HLA-DPA1*01:02-B1*04:01L
  source 1..13: note = Severe acute respiratory syndrome coronavirus 2
GIVFMCVEYCPIF

SEQ ID NO: 23632 - protein, 11 aa, Severe acute respiratory syndrome-related coronavirus
  REGION 1..11: note = Table B: HLA-DPA1*01:03-B1*04:01L HLA-DPA1*03:01-B1*105:01L
  source 1..11: note = Severe acute respiratory syndrome coronavirus 2
QTMLFTMLRKL

SEQ ID NO: 23633 - protein, 11 aa, Severe acute respiratory syndrome-related coronavirus
  REGION 1..11: note = Table B: HLA-DPA1*01:03-B1*04:01L
  source 1..11: note = Severe acute respiratory syndrome coronavirus 2
TYASALWEIQQ

SEQ ID NO: 23634 - protein, 16 aa, Severe acute respiratory syndrome-related coronavirus
  REGION 1..16: note = Table B: HLA-DPA1*01:03-B1*04:01L HLA-DPA1*01:03-B1*04:02L HLA-DPA1*01:03-B1*104:01L HLA-DRB1*08:03L
  source 1..16: note = Severe acute respiratory syndrome coronavirus 2
DYFNKKDWYDFVENPD

SEQ ID NO: 23635 - protein, 17 aa, Severe acute respiratory syndrome-related coronavirus
  REGION 1..17: note = Table B: HLA-DPA1*01:03-B1*04:01L
  source 1..17: note = Severe acute respiratory syndrome coronavirus 2
NPDILRVYANLGERVRQ

SEQ ID NO: 23636 - protein, 15 aa, Severe acute respiratory syndrome-related coronavirus
  REGION 1..15: note = Table B: HLA-DPA1*01:03-B1*04:01L
  source 1..15: note = Severe acute respiratory syndrome coronavirus 2
KARLYYDSMSYEDQD

SEQ ID NO: 23637 - protein, 12 aa, Severe acute respiratory syndrome-related coronavirus
  REGION 1..12: note = Table B: HLA-DPA1*01:03-B1*04:01L HLA-DPA1*01:03-B1*04:02L HLA-DPA1*01:02-B1*04:01L HLA-DRB1*16:01L
  source 1..12: note = Severe acute respiratory syndrome coronavirus 2
TTAYANSVFNIC

SEQ ID NO: 23638 - protein, 11 aa, Severe acute respiratory syndrome-related coronavirus
  REGION 1..11: note = Table B: HLA-DPA1*01:03-B1*04:01L HLA-DPA1*01:03-B1*04:02L
  source 1..11: note = Severe acute respiratory syndrome coronavirus 2
AYANSVFNICQ

SEQ ID NO: 23639 - protein, 13 aa, Severe acute respiratory syndrome-related coronavirus
  REGION 1..13: note = Table B: HLA-DPA1*01:03-B1*04:01L
  source 1..13: note = Severe acute respiratory syndrome coronavirus 2
YANSVFNICQAVT

SEQ ID NO: 23640 - protein, 16 aa, Severe acute respiratory syndrome-related coronavirus
  REGION 1..16: note = Table B: HLA-DPA1*01:03-B1*04:01L HLA-DRB1*09:01L
  source 1..16: note = Severe acute respiratory syndrome coronavirus 2
GQVFGLYKNTCVGSDN

SEQ ID NO: 23641 - protein, 15 aa, Severe acute respiratory syndrome-related coronavirus
  REGION 1..15: note = Table B: HLA-DPA1*01:03-B1*04:01L
  source 1..15: note = Severe acute respiratory syndrome coronavirus 2
YKLNVGDYFVLTSHT

SEQ ID NO: 23642 - protein, 13 aa, Severe acute respiratory syndrome-related coronavirus
  REGION 1..13: note = Table B: HLA-DPA1*01:03-B1*04:01L HLA-DPA1*01:03-B1*04:02L HLA-DPA1*02:01-B1*13:01L
  source 1..13: note = Severe acute respiratory syndrome coronavirus 2
EKALKYLPIDKCS

SEQ ID NO: 23643 - protein, 12 aa, Severe acute respiratory syndrome-related coronavirus
  REGION 1..12: note = Table B: HLA-DPA1*01:03-B1*04:01L HLA-DPA1*01:03-B1*04:02L HLA-DQA1*01:03-B1*06:01L
  source 1..12: note = Severe acute respiratory syndrome coronavirus 2
STLEQYVFCTVN

SEQ ID NO: 23644 - protein, 16 aa, Severe acute respiratory syndrome-related coronavirus
  REGION 1..16: note = Table B: HLA-DPA1*01:03-B1*04:01L HLA-DPA1*01:03-B1*04:02L
  source 1..16: note = Severe acute respiratory syndrome coronavirus 2
ARLRAKHYVYIGDPAQ

SEQ ID NO: 23645 - protein, 12 aa, Severe acute respiratory syndrome-related coronavirus
  REGION 1..12: note = Table B: HLA-DPA1*01:03-B1*04:01L HLA-DPA1*01:03-B1*04:02L HLA-DRB1*16:01L HLA-DRB1*15:03L
  source 1..12: note = Severe acute respiratory syndrome coronavirus 2
GFDYVYNPFMID

SEQ ID NO: 23646 - protein, 12 aa, Severe acute respiratory syndrome-related coronavirus
  REGION 1..12: note = Table B: HLA-DPA1*01:03-B1*04:01L HLA-DPA1*01:03-B1*04:02L
  source 1..12: note = Severe acute respiratory syndrome coronavirus 2
FDYVYNPFMIDV

SEQ ID NO: 23647 - protein, 18 aa, Severe acute respiratory syndrome-related coronavirus
  REGION 1..18: note = Table B: HLA-DPA1*01:03-B1*04:01L HLA-DRB1*09:01L
  source 1..18: note = Severe acute respiratory syndrome coronavirus 2
DGGSLYVNKHAFHTPAFD

SEQ ID NO: 23648 - protein, 16 aa, Severe acute respiratory syndrome-related coronavirus
  REGION 1..16: note = Table B: HLA-DPA1*01:03-B1*04:01L HLA-DQA1*05:05-B1*03:116L
  source 1..16: note = Severe acute respiratory syndrome coronavirus 2
IWDYKRDAPAHISTIG

SEQ ID NO: 23649 - protein, 11 aa, Severe acute respiratory syndrome-related coronavirus
  REGION 1..11: note = Table B: HLA-DPA1*01:03-B1*04:01L
  source 1..11: note = Severe acute respiratory syndrome coronavirus 2
ENDSKEGFFTY

SEQ ID NO: 23650 - protein, 14 aa, Severe acute respiratory syndrome-related coronavirus
  REGION 1..14: note = Table B: HLA-DPA1*01:03-B1*04:01L
  source 1..14: note = Severe acute respiratory syndrome coronavirus 2
WTAFVTNVNASSSE

SEQ ID NO: 23651 - protein, 14 aa, Severe acute respiratory syndrome-related coronavirus
  REGION 1..14: note = Table B: HLA-DPA1*01:03-B1*04:01L
  source 1..14: note = Severe acute respiratory syndrome coronavirus 2
TAFVTNVNASSSEA

SEQ ID NO: 23652 - protein, 13 aa, Severe acute respiratory syndrome-related coronavirus
  REGION 1..13: note = Table B: HLA-DPA1*01:03-B1*04:01L HLA-DPA1*01:03-B1*04:02L
  source 1..13: note = Severe acute respiratory syndrome coronavirus 2
TQDLFLPFFSNVT

SEQ ID NO: 23653 - protein, 16 aa, Severe acute respiratory syndrome-related coronavirus
  REGION 1..16: note = Table B: HLA-DPA1*01:03-B1*04:01L HLA-DRB1*10:01L
  source 1..16: note = Severe acute respiratory syndrome coronavirus 2
NGTKRFDNPVLPFNDG

SEQ ID NO: 23654 - protein, 13 aa, Severe acute respiratory syndrome-related coronavirus
  REGION 1..13: note = Table B: HLA-DPA1*01:03-B1*04:01L HLA-DPA1*01:02-B1*04:01L HLA-DRB1*16:01L HLA-DRB1*04:08L
  source 1..13: note = Severe acute respiratory syndrome coronavirus 2
NVVIKVCEFQFCN

SEQ ID NO: 23655 - protein, 12 aa, Severe acute respiratory syndrome-related coronavirus
  REGION 1..12: note = Table B: HLA-DPA1*01:03-B1*04:01L HLA-DPA1*01:03-B1*104:01L
  source 1..12: note = Severe acute respiratory syndrome coronavirus 2
IADYNYKLPDDF

SEQ ID NO: 23656 - protein, 15 aa, Severe acute respiratory syndrome-related coronavirus
  REGION 1..15: note = Table B: HLA-DPA1*01:03-B1*04:01L HLA-DRB1*08:02L
  source 1..15: note = Severe acute respiratory syndrome coronavirus 2
NSVAYSNNSIAIPTN

SEQ ID NO: 23657 - protein, 16 aa, Severe acute respiratory syndrome-related coronavirus
  REGION 1..16: note = Table B: HLA-DPA1*01:03-B1*04:01L
  source 1..16: note = Severe acute respiratory syndrome coronavirus 2
NRALTGIAVEQDKNTQ

SEQ ID NO: 23658 - protein, 13 aa, Severe acute respiratory syndrome-related coronavirus
  REGION 1..13: note = Table B: HLA-DPA1*01:03-B1*04:01L HLA-DRB1*04:08L
  source 1..13: note = Severe acute respiratory syndrome coronavirus 2
SANLAATKMSECV

SEQ ID NO: 23659 - protein, 16 aa, Severe acute respiratory syndrome-related coronavirus
  REGION 1..16: note = Table B: HLA-DPA1*01:03-B1*04:01L HLA-DQA1*05:05-B1*03:116L
  source 1..16: note = Severe acute respiratory syndrome coronavirus 2
GKGYHLMSFPQSAPHG

SEQ ID NO: 23660 - protein, 14 aa, Severe acute respiratory syndrome-related coronavirus
  REGION 1..14: note = Table B: HLA-DPA1*01:03-B1*04:01L HLA-DRB3*01:01L
  source 1..14: note = Severe acute respiratory syndrome coronavirus 2
DISGINASVVNIQK

SEQ ID NO: 23661 - protein, 11 aa, Severe acute respiratory syndrome-related coronavirus
  REGION 1..11: note = Table B: HLA-DPA1*01:03-B1*04:01L HLA-DPA1*01:03-B1*04:02L HLA-DRB1*16:01L
  source 1..11: note = Severe acute respiratory syndrome coronavirus 2
HSYFTSDYYQL

SEQ ID NO: 23662 - protein, 16 aa, Severe acute respiratory syndrome-related coronavirus
  REGION 1..16: note = Table B: HLA-DPA1*01:03-B1*04:01L
  source 1..16: note = Severe acute respiratory syndrome coronavirus 2
DTGVEHVTFFIYNKIV

SEQ ID NO: 23663 - protein, 14 aa, Severe acute respiratory syndrome-related coronavirus
  REGION 1..14: note = Table B: HLA-DPA1*01:03-B1*04:01L HLA-DRB1*07:01L
  source 1..14: note = Severe acute respiratory syndrome coronavirus 2
GDSGFAAYSRYRIG

SEQ ID NO: 23664 - protein, 15 aa, Severe acute respiratory syndrome-related coronavirus
  REGION 1..15: note = Table B: HLA-DPA1*01:03-B1*04:01L HLA-DQA1*05:05-B1*03:116L
  source 1..15: note = Severe acute respiratory syndrome coronavirus 2
IGNYKLNTDHSSSSD

SEQ ID NO: 23665 - protein, 11 aa, Severe acute respiratory syndrome-related coronavirus
  REGION 1..11: note = Table B: HLA-DPA1*01:03-B1*04:01L
  source 1..11: note = Severe acute respiratory syndrome coronavirus 2
FHLVDFQVTIA

SEQ ID NO: 23666 - protein, 18 aa, Severe acute respiratory syndrome-related coronavirus
  REGION 1..18: note = Table B: HLA-DPA1*01:03-B1*04:01L
  source 1..18: note = Severe acute respiratory syndrome coronavirus 2
LPNNTASWFTALTQHGKE

SEQ ID NO: 23667 - protein, 17 aa, Severe acute respiratory syndrome-related coronavirus
  REGION 1..17: note = Table B: HLA-DPA1*01:03-B1*04:01L
  source 1..17: note = Severe acute respiratory syndrome coronavirus 2
GIIWVATEGALNTPKDH

SEQ ID NO: 23668 - protein, 13 aa, Severe acute respiratory syndrome-related coronavirus
  REGION 1..13: note = Table B: HLA-DPA1*01:03-B1*04:01L
  source 1..13: note = Severe acute respiratory syndrome coronavirus 2
GDAALALLLLDRL

SEQ ID NO: 23669 - protein, 18 aa, Severe acute respiratory syndrome-related coronavirus
  REGION 1..18: note = Table B: HLA-DPA1*01:03-B1*04:01L HLA-DPA1*01:03-B1*04:02L HLA-DPA1*01:03-B1*104:01L
  source 1..18: note = Severe acute respiratory syndrome coronavirus 2
ATKAYNVTQAFGRRGPEQ

SEQ ID NO: 23670 - protein, 15 aa, Severe acute respiratory syndrome-related coronavirus
  REGION 1..15: note = Table B: HLA-DPA1*01:03-B1*04:01L HLA-DPA1*01:03-B1*02:01L HLA-DPA1*01:03-B1*104:01L HLA-DQA1*05:05-B1*03:01L
  source 1..15: note = Severe acute respiratory syndrome coronavirus 2
GAIKLDDKDPNFKDQ

SEQ ID NO: 23671 - protein, 18 aa, Severe acute respiratory syndrome-related coronavirus
  REGION 1..18: note = Table B: HLA-DQA1*05:05-B1*03:116L
  source 1..18: note = Severe acute respiratory syndrome coronavirus 2
EHEHEIAWYTERSEKSYE

SEQ ID NO: 23672 - protein, 15 aa, Severe acute respiratory syndrome-related coronavirus
  REGION 1..15: note = Table B: HLA-DQA1*05:05-B1*03:116L HLA-DPA1*01:03-B1*02:01L
  source 1..15: note = Severe acute respiratory syndrome coronavirus 2
IAWYTERSEKSYELQ

SEQ ID NO: 23673 - protein, 14 aa, Severe acute respiratory syndrome-related coronavirus
  REGION 1..14: note = Table B: HLA-DQA1*05:05-B1*03:116L HLA-DRB1*08:02L
  source 1..14: note = Severe acute respiratory syndrome coronavirus 2
INIVGDFKLNEEIA

SEQ ID NO: 23674 - protein, 16 aa, Severe acute respiratory syndrome-related coronavirus
  REGION 1..16: note = Table B: HLA-DQA1*05:05-B1*03:116L
  source 1..16: note = Severe acute respiratory syndrome coronavirus 2
LASFSASTSAFVETVK

SEQ ID NO: 23675 - protein, 16 aa, Severe acute respiratory syndrome-related coronavirus
  REGION 1..16: note = Table B: HLA-DQA1*05:05-B1*03:116L
  source 1..16: note = Severe acute respiratory syndrome coronavirus 2
APKEIIFLEGETLPTE

SEQ ID NO: 23676 - protein, 19 aa, Severe acute respiratory syndrome-related coronavirus
  REGION 1..19: note = Table B: HLA-DQA1*05:05-B1*03:116L
  source 1..19: note = Severe acute respiratory syndrome coronavirus 2
APTKVTFGDDTVIEVQGYK

SEQ ID NO: 23677 - protein, 16 aa, Severe acute respiratory syndrome-related coronavirus
  REGION 1..16: note = Table B: HLA-DQA1*05:05-B1*03:116L
  source 1..16: note = Severe acute respiratory syndrome coronavirus 2
KPLEFGATSAALQPEE

SEQ ID NO: 23678 - protein, 18 aa, Severe acute respiratory syndrome-related coronavirus
  REGION 1..18: note = Table B: HLA-DQA1*05:05-B1*03:116L HLA-DRB1*08:02L
  source 1..18: note = Severe acute respiratory syndrome coronavirus 2
KPTVVVNAANVYLKHGGG

SEQ ID NO: 23679 - protein, 13 aa, Severe acute respiratory syndrome-related coronavirus
  REGION 1..13: note = Table B: HLA-DQA1*05:05-B1*03:116L
  source 1..13: note = Severe acute respiratory syndrome coronavirus 2
GGVAGALNKATNN

SEQ ID NO: 23680 - protein, 18 aa, Severe acute respiratory syndrome-related coronavirus
  REGION 1..18: note = Table B: HLA-DQA1*05:05-B1*03:116L
  source 1..18: note = Severe acute respiratory syndrome coronavirus 2
IQRKYKGIKIQEGVVDYG

SEQ ID NO: 23681 - protein, 18 aa, Severe acute respiratory syndrome-related coronavirus
  REGION 1..18: note = Table B: HLA-DQA1*05:05-B1*03:116L
  source 1..18: note = Severe acute respiratory syndrome coronavirus 2
SYFTEQPIDLVPNQPYPN

SEQ ID NO: 23682 - protein, 15 aa, Severe acute respiratory syndrome-related coronavirus
  REGION 1..15: note = Table B: HLA-DQA1*05:05-B1*03:116L
  source 1..15: note = Severe acute respiratory syndrome coronavirus 2
QPIDLVPNQPYPNAS

SEQ ID NO: 23683 - protein, 16 aa, Severe acute respiratory syndrome-related coronavirus
  REGION 1..16: note = Table B: HLA-DQA1*05:05-B1*03:116L
  source 1..16: note = Severe acute respiratory syndrome coronavirus 2
SNSFDVLKSEDAQGMD

SEQ ID NO: 23684 - protein, 14 aa, Severe acute respiratory syndrome-related coronavirus
  REGION 1..14: note = Table B: HLA-DQA1*05:05-B1*03:116L
  source 1..14: note = Severe acute respiratory syndrome coronavirus 2
FDVLKSEDAQGMDN

SEQ ID NO: 23685 - protein, 16 aa, Severe acute respiratory syndrome-related coronavirus
  REGION 1..16: note = Table B: HLA-DQA1*05:05-B1*03:116L
  source 1..16: note = Severe acute respiratory syndrome coronavirus 2
LSHFVNLDNLRANNTK

SEQ ID NO: 23686 - protein, 17 aa, Severe acute respiratory syndrome-related coronavirus
  REGION 1..17: note = Table B: HLA-DQA1*05:05-B1*03:116L
  source 1..17: note = Severe acute respiratory syndrome coronavirus 2
QPILLLDQALVSDVGDS

SEQ ID NO: 23687 - protein, 14 aa, Severe acute respiratory syndrome-related coronavirus
  REGION 1..14: note = Table B: HLA-DQA1*05:05-B1*03:116L
  source 1..14: note = Severe acute respiratory syndrome coronavirus 2
VNTFSSTFNVPMEK

SEQ ID NO: 23688 - protein, 18 aa, Severe acute respiratory syndrome-related coronavirus
  REGION 1..18: note = Table B: HLA-DQA1*05:05-B1*03:116L
  source 1..18: note = Severe acute respiratory syndrome coronavirus 2
ETKDVVECLKLSHQSDIE

SEQ ID NO: 23689 - protein, 17 aa, Severe acute respiratory syndrome-related coronavirus
  REGION 1..17: note = Table B: HLA-DQA1*05:05-B1*03:116L
  source 1..17: note = Severe acute respiratory syndrome coronavirus 2
DGSIIQFPNTYLEGSVR

SEQ ID NO: 23690 - protein, 16 aa, Severe acute respiratory syndrome-related coronavirus
  REGION 1..16: note = Table B: HLA-DQA1*05:05-B1*03:116L
  source 1..16: note = Severe acute respiratory syndrome coronavirus 2
NDILLAKDTTEAFEKM

SEQ ID NO: 23691 - protein, 16 aa, Severe acute respiratory syndrome-related coronavirus
  REGION 1..16: note = Table B: HLA-DQA1*05:05-B1*03:116L HLA-DPA1*01:03-B1*02:01L
  source 1..16: note = Severe acute respiratory syndrome coronavirus 2
IASEFSSLPSYAAFAT

SEQ ID NO: 23692 - protein, 15 aa, Severe acute respiratory syndrome-related coronavirus
  REGION 1..15: note = Table B: HLA-DQA1*05:05-B1*03:116L HLA-DPA1*01:03-B1*02:01L HLA-DPA1*01:02-B1*04:01L
  source 1..15: note = Severe acute respiratory syndrome coronavirus 2
LPSYAAFATAQEAYE

SEQ ID NO: 23693 - protein, 18 aa, Severe acute respiratory syndrome-related coronavirus
  REGION 1..18: note = Table B: HLA-DQA1*05:05-B1*03:116L
  source 1..18: note = Severe acute respiratory syndrome coronavirus 2
ADSKIVQLSEISMDNSPN

SEQ ID NO: 23694 - protein, 15 aa, Severe acute respiratory syndrome-related coronavirus
  REGION 1..15: note = Table B: HLA-DQA1*05:05-B1*03:116L
  source 1..15: note = Severe acute respiratory syndrome coronavirus 2
TALRANSAVKLQNNE

SEQ ID NO: 23695 - protein, 17 aa, Severe acute respiratory syndrome-related coronavirus
  REGION 1..17: note = Table B: HLA-DQA1*05:05-B1*03:116L
  source 1..17: note = Severe acute respiratory syndrome coronavirus 2
KGKYVQIPTTCANDPVG

SEQ ID NO: 23696 - protein, 15 aa, Severe acute respiratory syndrome-related coronavirus
  REGION 1..15: note = Table B: HLA-DQA1*05:05-B1*03:116L
  source 1..15: note = Severe acute respiratory syndrome coronavirus 2
EETIYNLLKDCPAVA

SEQ ID NO: 23697 - protein, 15 aa, Severe acute respiratory syndrome-related coronavirus
  REGION 1..15: note = Table B: HLA-DQA1*05:05-B1*03:116L
  source 1..15: note = Severe acute respiratory syndrome coronavirus 2
GDFIQTTPGSGVPVV

SEQ ID NO: 23698 - protein, 17 aa, Severe acute respiratory syndrome-related coronavirus
  REGION 1..17: note = Table B: HLA-DQA1*05:05-B1*03:116L
  source 1..17: note = Severe acute respiratory syndrome coronavirus 2
TGYHFRELGVVHNQDVN

SEQ ID NO: 23699 - protein, 14 aa, Severe acute respiratory syndrome-related coronavirus
  REGION 1..14: note = Table B: HLA-DQA1*05:05-B1*03:116L
  source 1..14: note = Severe acute respiratory syndrome coronavirus 2
AADPAMHAASGNLL

SEQ ID NO: 23700 - protein, 18 aa, Severe acute respiratory syndrome-related coronavirus
  REGION 1..18: note = Table B: HLA-DQA1*05:05-B1*03:116L
  source 1..18: note = Severe acute respiratory syndrome coronavirus 2
ADPAMHAASGNLLLDKRT

SEQ ID NO: 23701 - protein, 14 aa, Severe acute respiratory syndrome-related coronavirus
  REGION 1..14: note = Table B: HLA-DQA1*05:05-B1*03:116L
  source 1..14: note = Severe acute respiratory syndrome coronavirus 2
NNVAFQTVKPGNFN

SEQ ID NO: 23702 - protein, 16 aa, Severe acute respiratory syndrome-related coronavirus
  REGION 1..16: note = Table B: HLA-DQA1*05:05-B1*03:116L
  source 1..16: note = Severe acute respiratory syndrome coronavirus 2
LKHFFFAQDGNAAISD

SEQ ID NO: 23703 - protein, 16 aa, Severe acute respiratory syndrome-related coronavirus
  REGION 1..16: note = Table B: HLA-DQA1*05:05-B1*03:116L
  source 1..16: note = Severe acute respiratory syndrome coronavirus 2
ANQVIVNNLDKSAGFP

SEQ ID NO: 23704 - protein, 16 aa, Severe acute respiratory syndrome-related coronavirus
  REGION 1..16: note = Table B: HLA-DQA1*05:05-B1*03:116L
  source 1..16: note = Severe acute respiratory syndrome coronavirus 2
ANSVFNICQAVTANVN

SEQ ID NO: 23705 - protein, 16 aa, Severe acute respiratory syndrome-related coronavirus
  REGION 1..16: note = Table B: HLA-DQA1*05:05-B1*03:116L
  source 1..16: note = Severe acute respiratory syndrome coronavirus 2
VASIKNFKSVLYYQNN

SEQ ID NO: 23706 - protein, 11 aa, Severe acute respiratory syndrome-related coronavirus
  REGION 1..11: note = Table B: HLA-DQA1*05:05-B1*03:116L
  source 1..11: note = Severe acute respiratory syndrome coronavirus 2
KLHDELTGHML

SEQ ID NO: 23707 - protein, 18 aa, Severe acute respiratory syndrome-related coronavirus
  REGION 1..18: note = Table B: HLA-DQA1*05:05-B1*03:116L
  source 1..18: note = Severe acute respiratory syndrome coronavirus 2
TSRYWEPEFYEAMYTPHT

SEQ ID NO: 23708 - protein, 18 aa, Severe acute respiratory syndrome-related coronavirus
  REGION 1..18: note = Table B: HLA-DQA1*05:05-B1*03:116L HLA-DPA1*01:03-B1*02:01L HLA-DRB1*08:03L
  source 1..18: note = Severe acute respiratory syndrome coronavirus 2
YDHVISTSHKLVLSVNPY

SEQ ID NO: 23709 - protein, 15 aa, Severe acute respiratory syndrome-related coronavirus
  REGION 1..15: note = Table B: HLA-DQA1*05:05-B1*03:116L
  source 1..15: note = Severe acute respiratory syndrome coronavirus 2
AGDYILANTCTERLK

SEQ ID NO: 23710 - protein, 11 aa, Severe acute respiratory syndrome-related coronavirus
  REGION 1..11: note = Table B: HLA-DQA1*05:05-B1*03:116L HLA-DQA1*05:05-B1*03:01L
  source 1..11: note = Severe acute respiratory syndrome coronavirus 2
SAPTLVPQEHY

SEQ ID NO: 23711 - protein, 16 aa, Severe acute respiratory syndrome-related coronavirus
  REGION 1..16: note = Table B: HLA-DQA1*05:05-B1*03:116L
  source 1..16: note = Severe acute respiratory syndrome coronavirus 2
SALVYDNKLKAHKDKS

SEQ ID NO: 23712 - protein, 16 aa, Severe acute respiratory syndrome-related coronavirus
  REGION 1..16: note = Table B: HLA-DQA1*05:05-B1*03:116L
  source 1..16: note = Severe acute respiratory syndrome coronavirus 2
KGVITHDVSSAINRPQ

SEQ ID NO: 23713 - protein, 15 aa, Severe acute respiratory syndrome-related coronavirus
  REGION 1..15: note = Table B: HLA-DQA1*05:05-B1*03:116L
  source 1..15: note = Severe acute respiratory syndrome coronavirus 2
SPYNSQNAVASKILG

SEQ ID NO: 23714 - protein, 20 aa, Severe acute respiratory syndrome-related coronavirus
  REGION 1..20: note = Table B: HLA-DQA1*05:05-B1*03:116L
  source 1..20: note = Severe acute respiratory syndrome coronavirus 2
KPPPGDQFKHLIPLMYKGLP

SEQ ID NO: 23715 - protein, 16 aa, Severe acute respiratory syndrome-related coronavirus
  REGION 1..16: note = Table B: HLA-DQA1*05:05-B1*03:116L HLA-DRB1*08:02L
  source 1..16: note = Severe acute respiratory syndrome coronavirus 2
IPLMYKGLPWNVVRIK

SEQ ID NO: 23716 - protein, 16 aa, Severe acute respiratory syndrome-related coronavirus
  REGION 1..16: note = Table B: HLA-DQA1*05:05-B1*03:116L
  source 1..16: note = Severe acute respiratory syndrome coronavirus 2
DVEWKFYDAQPCSDKA

SEQ ID NO: 23717 - protein, 19 aa, Severe acute respiratory syndrome-related coronavirus
  REGION 1..19: note = Table B: HLA-DQA1*05:05-B1*03:116L
  source 1..19: note = Severe acute respiratory syndrome coronavirus 2
KPVPEVKILNNLGVDIAAN

SEQ ID NO: 23718 - protein, 19 aa, Severe acute respiratory syndrome-related coronavirus
  REGION 1..19: note = Table B: HLA-DQA1*05:05-B1*03:116L
  source 1..19: note = Severe acute respiratory syndrome coronavirus 2
PVPEVKILNNLGVDIAANT

SEQ ID NO: 23719 - protein, 14 aa, Severe acute respiratory syndrome-related coronavirus
  REGION 1..14: note = Table B: HLA-DQA1*05:05-B1*03:116L
  source 1..14: note = Severe acute respiratory syndrome coronavirus 2
AFVTNVNASSSEAF

SEQ ID NO: 23720 - protein, 14 aa, Severe acute respiratory syndrome-related coronavirus
  REGION 1..14: note = Table B: HLA-DQA1*05:05-B1*03:116L
  source 1..14: note = Severe acute respiratory syndrome coronavirus 2
SLLIVNNATNVVIK

SEQ ID NO: 23721 - protein, 17 aa, Severe acute respiratory syndrome-related coronavirus
  REGION 1..17: note = Table B: HLA-DQA1*05:05-B1*03:116L HLA-DPA1*01:03-B1*02:01L
  source 1..17: note = Severe acute respiratory syndrome coronavirus 2
LPQGFSALEPLVDLPIG

SEQ ID NO: 23722 - protein, 15 aa, Severe acute respiratory syndrome-related coronavirus
  REGION 1..15: note = Table B: HLA-DQA1*05:05-B1*03:116L
  source 1..15: note = Severe acute respiratory syndrome coronavirus 2
EKGIYQTSNFRVQPT

SEQ ID NO: 23723 - protein, 14 aa, Severe acute respiratory syndrome-related coronavirus
  REGION 1..14: note = Table B: HLA-DQA1*05:05-B1*03:116L
  source 1..14: note = Severe acute respiratory syndrome coronavirus 2
GIYQTSNFRVQPTE

SEQ ID NO: 23724 - protein, 17 aa, Severe acute respiratory syndrome-related coronavirus
  REGION 1..17: note = Table B: HLA-DQA1*05:05-B1*03:116L
  source 1..17: note = Severe acute respiratory syndrome coronavirus 2
TSNFRVQPTESIVRFPN

SEQ ID NO: 23725 - protein, 16 aa, Severe acute respiratory syndrome-related coronavirus
  REGION 1..16: note = Table B: HLA-DQA1*05:05-B1*03:116L
  source 1..16: note = Severe acute respiratory syndrome coronavirus 2
LKPFERDISTEIYQAG

SEQ ID NO: 23726 - protein, 18 aa, Severe acute respiratory syndrome-related coronavirus
  REGION 1..18: note = Table B: HLA-DQA1*05:05-B1*03:116L HLA-DRB1*09:01L
  source 1..18: note = Severe acute respiratory syndrome coronavirus 2
QVKQIYKTPPIKDFGGFN

SEQ ID NO: 23727 - protein, 20 aa, Severe acute respiratory syndrome-related coronavirus
  REGION 1..20: note = Table B: HLA-DQA1*05:05-B1*03:116L
  source 1..20: note = Severe acute respiratory syndrome coronavirus 2
TPPIKDFGGFNFSQILPDPS

SEQ ID NO: 23728 - protein, 17 aa, Severe acute respiratory syndrome-related coronavirus
  REGION 1..17: note = Table B: HLA-DQA1*05:05-B1*03:116L
  source 1..17: note = Severe acute respiratory syndrome coronavirus 2
IQDSLSSTASALGKLQD

SEQ ID NO: 23729 - protein, 14 aa, Severe acute respiratory syndrome-related coronavirus
  REGION 1..14: note = Table B: HLA-DQA1*05:05-B1*03:116L HLA-DPA1*01:02-B1*04:01L
  source 1..14: note = Severe acute respiratory syndrome coronavirus 2
AAEIRASANLAATK

SEQ ID NO: 23730 - protein, 15 aa, Severe acute respiratory syndrome-related coronavirus
  REGION 1..15: note = Table B: HLA-DQA1*05:05-B1*03:116L
  source 1..15: note = Severe acute respiratory syndrome coronavirus 2
VDLGDISGINASVVN

SEQ ID NO: 23731 - protein, 15 aa, Severe acute respiratory syndrome-related coronavirus
  REGION 1..15: note = Table B: HLA-DQA1*05:05-B1*03:116L HLA-DRB3*01:01L
  source 1..15: note = Severe acute respiratory syndrome coronavirus 2
DYYQLYSTQLSTDTG

SEQ ID NO: 23732 - protein, 16 aa, Severe acute respiratory syndrome-related coronavirus
  REGION 1..16: note = Table B: HLA-DQA1*05:05-B1*03:116L
  source 1..16: note = Severe acute respiratory syndrome coronavirus 2
LSYYKLGASQRVAGDS

SEQ ID NO: 23733 - protein, 15 aa, Severe acute respiratory syndrome-related coronavirus
  REGION 1..15: note = Table B: HLA-DQA1*05:05-B1*03:116L
  source 1..15: note = Severe acute respiratory syndrome coronavirus 2
GNYKLNTDHSSSSDN

SEQ ID NO: 23734 - protein, 18 aa, Severe acute respiratory syndrome-related coronavirus
  REGION 1..18: note = Table B: HLA-DQA1*05:05-B1*03:116L
  source 1..18: note = Severe acute respiratory syndrome coronavirus 2
TPSGTWLTYTGAIKLDDK

SEQ ID NO: 23735 - protein, 14 aa, Severe acute respiratory syndrome-related coronavirus
  REGION 1..14: note = Table B: HLA-DQA1*05:05-B1*03:116L HLA-DRB1*08:02L
  source 1..14: note = Severe acute respiratory syndrome coronavirus 2
TYTGAIKLDDKDPN

SEQ ID NO: 23736 - protein, 14 aa, Severe acute respiratory syndrome-related coronavirus
  REGION 1..14: note = Table B: HLA-DRB1*04:10L
  source 1..14: note = Severe acute respiratory syndrome coronavirus 2
LEGIQYGRSGETLG

SEQ ID NO: 23737 - protein, 13 aa, Severe acute respiratory syndrome-related coronavirus
  REGION 1..13: note = Table B: HLA-DRB1*04:10L
  source 1..13: note = Severe acute respiratory syndrome coronavirus 2
YEKLKPVLDWLEE

SEQ ID NO: 23738 - protein, 11 aa, Severe acute respiratory syndrome-related coronavirus
  REGION 1..11: note = Table B: HLA-DRB1*04:10L
  source 1..11: note = Severe acute respiratory syndrome coronavirus 2
GALNKATNNAM

SEQ ID NO: 23739 - protein, 11 aa, Severe acute respiratory syndrome-related coronavirus
  REGION 1..11: note = Table B: HLA-DRB1*04:10L
  source 1..11: note = Severe acute respiratory syndrome coronavirus 2
ALNKATNNAMQ

SEQ ID NO: 23740 - protein, 12 aa, Severe acute respiratory syndrome-related coronavirus
  REGION 1..12: note = Table B: HLA-DRB1*04:10L
  source 1..12: note = Severe acute respiratory syndrome coronavirus 2
EGVLTAVVIPTK

SEQ ID NO: 23741 - protein, 13 aa, Severe acute respiratory syndrome-related coronavirus
  REGION 1..13: note = Table B: HLA-DRB1*04:10L HLA-DRB1*04:08L
  source 1..13: note = Severe acute respiratory syndrome coronavirus 2
SLKITEEVGHTDL

SEQ ID NO: 23742 - protein, 12 aa, Severe acute respiratory syndrome-related coronavirus
  REGION 1..12: note = Table B: HLA-DRB1*04:10L
  source 1..12: note = Severe acute respiratory syndrome coronavirus 2
MPTTIAKNTVKS

SEQ ID NO: 23743 - protein, 12 aa, Severe acute respiratory syndrome-related coronavirus
  REGION 1..12: note = Table B: HLA-DRB1*04:10L HLA-DPA1*03:01-B1*105:01L
  source 1..12: note = Severe acute respiratory syndrome coronavirus 2
VDSVTVKNGSIH

SEQ ID NO: 23744 - protein, 13 aa, Severe acute respiratory syndrome-related coronavirus
  REGION 1..13: note = Table B: HLA-DRB1*04:10L
  source 1..13: note = Severe acute respiratory syndrome coronavirus 2
ELAKNVSLDNVLS

SEQ ID NO: 23745 - protein, 14 aa, Severe acute respiratory syndrome-related coronavirus
  REGION 1..14: note = Table B: HLA-DRB1*04:10L
  source 1..14: note = Severe acute respiratory syndrome coronavirus 2
SAARQGFVDSDVET

SEQ ID NO: 23746 - protein, 12 aa, Severe acute respiratory syndrome-related coronavirus
  REGION 1..12: note = Table B: HLA-DRB1*04:10L HLA-DRB1*04:08L
  source 1..12: note = Severe acute respiratory syndrome coronavirus 2
GPFVDRQTAQAA

SEQ ID NO: 23747 - protein, 14 aa, Severe acute respiratory syndrome-related coronavirus
  REGION 1..14: note = Table B: HLA-DRB1*04:10L HLA-DRB1*04:08L
  source 1..14: note = Severe acute respiratory syndrome coronavirus 2
YEPLTQDHVDILGP

SEQ ID NO: 23748 - protein, 12 aa, Severe acute respiratory syndrome-related coronavirus
  REGION 1..12: note = Table B: HLA-DRB1*04:10L HLA-DRB1*14:54L HLA-DRB1*04:08L
  source 1..12: note = Severe acute respiratory syndrome coronavirus 2
ASEFSSLPSYAA

SEQ ID NO: 23749 - protein, 12 aa, Severe acute respiratory syndrome-related coronavirus
  REGION 1..12: note = Table B: HLA-DRB1*04:10L HLA-DRB1*14:54L
  source 1..12: note = Severe acute respiratory syndrome coronavirus 2
LNIIPLTTAAKL

SEQ ID NO: 23750 - protein, 13 aa, Severe acute respiratory syndrome-related coronavirus
  REGION 1..13: note = Table B: HLA-DRB1*04:10L
  source 1..13: note = Severe acute respiratory syndrome coronavirus 2
ALWEIQQVVDADS

SEQ ID NO: 23751 - protein, 13 aa, Severe acute respiratory syndrome-related coronavirus
  REGION 1..13: note = Table B: HLA-DRB1*04:10L
  source 1..13: note = Severe acute respiratory syndrome coronavirus 2
ANSAVKLQNNELS

SEQ ID NO: 23752 - protein, 13 aa, Severe acute respiratory syndrome-related coronavirus
  REGION 1..13: note = Table B: HLA-DRB1*04:10L HLA-DRB1*08:03L
  source 1..13: note = Severe acute respiratory syndrome coronavirus 2
AESHVDTDLTKPY

SEQ ID NO: 23753 - protein, 12 aa, Severe acute respiratory syndrome-related coronavirus
  REGION 1..12: note = Table B: HLA-DRB1*04:10L
  source 1..12: note = Severe acute respiratory syndrome coronavirus 2
VPFVVSTGYHFR

SEQ ID NO: 23754 - protein, 11 aa, Severe acute respiratory syndrome-related coronavirus
  REGION 1..11: note = Table B: HLA-DRB1*04:10L HLA-DRB1*04:08L
  source 1..11: note = Severe acute respiratory syndrome coronavirus 2
VVHNQDVNLHS

SEQ ID NO: 23755 - protein, 13 aa, Severe acute respiratory syndrome-related coronavirus
  REGION 1..13: note = Table B: HLA-DRB1*04:10L
  source 1..13: note = Severe acute respiratory syndrome coronavirus 2
FAQDGNAAISDYD

SEQ ID NO: 23756 - protein, 13 aa, Severe acute respiratory syndrome-related coronavirus
  REGION 1..13: note = Table B: HLA-DRB1*04:10L
  source 1..13: note = Severe acute respiratory syndrome coronavirus 2
SIAATRGATVVIG

SEQ ID NO: 23757 - protein, 13 aa, Severe acute respiratory syndrome-related coronavirus
  REGION 1..13: note = Table B: HLA-DRB1*04:10L HLA-DRB1*14:54L HLA-DRB1*04:08L
  source 1..13: note = Severe acute respiratory syndrome coronavirus 2
AAETLKATEETFK

SEQ ID NO: 23758 - protein, 12 aa, Severe acute respiratory syndrome-related coronavirus
  REGION 1..12: note = Table B: HLA-DRB1*04:10L
  source 1..12: note = Severe acute respiratory syndrome coronavirus 2
TGYVDTPNNTDF

SEQ ID NO: 23759 - protein, 13 aa, Severe acute respiratory syndrome-related coronavirus
  REGION 1..13: note = Table B: HLA-DRB1*04:10L
  source 1..13: note = Severe acute respiratory syndrome coronavirus 2
GEVPVSIINNTVY

SEQ ID NO: 23760 - protein, 13 aa, Severe acute respiratory syndrome-related coronavirus
  REGION 1..13: note = Table B: HLA-DRB1*04:10L
  source 1..13: note = Severe acute respiratory syndrome coronavirus 2
DGVVQQLPETYFT

SEQ ID NO: 23761 - protein, 13 aa, Severe acute respiratory syndrome-related coronavirus
  REGION 1..13: note = Table B: HLA-DRB1*04:10L HLA-DRB1*12:01L HLA-DPA1*02:01-B1*13:01L HLA-DRB1*08:03L
  source 1..13: note = Severe acute respiratory syndrome coronavirus 2
VETFYPKLQSSQA

SEQ ID NO: 23762 - protein, 14 aa, Severe acute respiratory syndrome-related coronavirus
  REGION 1..14: note = Table B: HLA-DRB1*04:10L HLA-DRB3*01:01L
  source 1..14: note = Severe acute respiratory syndrome coronavirus 2
VLRQWLPTGTLLVD

SEQ ID NO: 23763 - protein, 12 aa, Severe acute respiratory syndrome-related coronavirus
  REGION 1..12: note = Table B: HLA-DRB1*04:10L
  source 1..12: note = Severe acute respiratory syndrome coronavirus 2
KNVTKENDSKEG

SEQ ID NO: 23764 - protein, 13 aa, Severe acute respiratory syndrome-related coronavirus
  REGION 1..13: note = Table B: HLA-DRB1*04:10L HLA-DRB1*08:02L
  source 1..13: note = Severe acute respiratory syndrome coronavirus 2
SVLYNSASFSTFK

SEQ ID NO: 23765 - protein, 13 aa, Severe acute respiratory syndrome-related coronavirus
  REGION 1..13: note = Table B: HLA-DRB1*04:10L HLA-DRB1*12:02L HLA-DRB1*08:03L
  source 1..13: note = Severe acute respiratory syndrome coronavirus 2
SNNLDSKVGGNYN

SEQ ID NO: 23766 - protein, 12 aa, Severe acute respiratory syndrome-related coronavirus
  REGION 1..12: note = Table B: HLA-DRB1*04:10L
  source 1..12: note = Severe acute respiratory syndrome coronavirus 2
WRVYSTGSNVFQ

SEQ ID NO: 23767 - protein, 12 aa, Severe acute respiratory syndrome-related coronavirus
  REGION 1..12: note = Table B: HLA-DRB1*04:10L
  source 1..12: note = Severe acute respiratory syndrome coronavirus 2
RVYSTGSNVFQT

SEQ ID NO: 23768 - protein, 13 aa, Severe acute respiratory syndrome-related coronavirus
  REGION 1..13: note = Table B: HLA-DRB1*04:10L
  source 1..13: note = Severe acute respiratory syndrome coronavirus 2
TTEILPVSMTKTS

SEQ ID NO: 23769 - protein, 11 aa, Severe acute respiratory syndrome-related coronavirus
  REGION 1..11: note = Table B: HLA-DRB1*04:10L HLA-DRB1*14:54L HLA-DRB1*04:08L
  source 1..11: note = Severe acute respiratory syndrome coronavirus 2
SAIGKIQDSLS

SEQ ID NO: 23770 - protein, 13 aa, Severe acute respiratory syndrome-related coronavirus
  REGION 1..13: note = Table B: HLA-DRB1*04:10L
  source 1..13: note = Severe acute respiratory syndrome coronavirus 2
FGAISSVLNDILS

SEQ ID NO: 23771 - protein, 15 aa, Severe acute respiratory syndrome-related coronavirus
  REGION 1..15: note = Table B: HLA-DRB1*04:10L HLA-DPA1*01:03-B1*04:02L HLA-DPA1*01:02-B1*04:01L
  source 1..15: note = Severe acute respiratory syndrome coronavirus 2
GPEQTQGNFGDQELI

SEQ ID NO: 23772 - protein, 11 aa, Severe acute respiratory syndrome-related coronavirus
  REGION 1..11: note = Table B: HLA-DRB1*04:10L
  source 1..11: note = Severe acute respiratory syndrome coronavirus 2
AYKTFPPTEPK

SEQ ID NO: 23773 - protein, 16 aa, Severe acute respiratory syndrome-related coronavirus
  REGION 1..16: note = Table B: HLA-DRB1*09:01L HLA-DPA1*01:03-B1*104:01L HLA-DRB1*07:01L
  source 1..16: note = Severe acute respiratory syndrome coronavirus 2
GHSYGADLKSFDLGDE

SEQ ID NO: 23774 - protein, 14 aa, Severe acute respiratory syndrome-related coronavirus
  REGION 1..14: note = Table B: HLA-DRB1*09:01L
  source 1..14: note = Severe acute respiratory syndrome coronavirus 2
MGRIRSVYPVASPN

SEQ ID NO: 23775 - protein, 15 aa, Severe acute respiratory syndrome-related coronavirus
  REGION 1..15: note = Table B: HLA-DRB1*09:01L
  source 1..15: note = Severe acute respiratory syndrome coronavirus 2
ADSIIIGGAKLKALN

SEQ ID NO: 23776 - protein, 14 aa, Severe acute respiratory syndrome-related coronavirus
  REGION 1..14: note = Table B: HLA-DRB1*09:01L HLA-DRB1*07:01L
  source 1..14: note = Severe acute respiratory syndrome coronavirus 2
EDIQLLKSAYENFN

SEQ ID NO: 23777 - protein, 12 aa, Severe acute respiratory syndrome-related coronavirus
  REGION 1..12: note = Table B: HLA-DRB1*09:01L
  source 1..12: note = Severe acute respiratory syndrome coronavirus 2
ITTYPGQGLNGY

SEQ ID NO: 23778 - protein, 17 aa, Severe acute respiratory syndrome-related coronavirus
  REGION 1..17: note = Table B: HLA-DRB1*09:01L HLA-DPA1*01:03-B1*04:02L
  source 1..17: note = Severe acute respiratory syndrome coronavirus 2
SPDAVTAYNGYLTSSSK

SEQ ID NO: 23779 - protein, 16 aa, Severe acute respiratory syndrome-related coronavirus
  REGION 1..16: note = Table B: HLA-DRB1*09:01L
  source 1..16: note = Severe acute respiratory syndrome coronavirus 2
GSIHLYFDKAGQKTYE

SEQ ID NO: 23780 - protein, 17 aa, Severe acute respiratory syndrome-related coronavirus
  REGION 1..17: note = Table B: HLA-DRB1*09:01L HLA-DPA1*01:03-B1*02:01L HLA-DPA1*01:03-B1*104:01L HLA-DQA1*05:05-B1*03:01L
  source 1..17: note = Severe acute respiratory syndrome coronavirus 2
LPINVIVFDGKSKCEES

SEQ ID NO: 23781 - protein, 17 aa, Severe acute respiratory syndrome-related coronavirus
  REGION 1..17: note = Table B: HLA-DRB1*09:01L
  source 1..17: note = Severe acute respiratory syndrome coronavirus 2
PINVIVFDGKSKCEESS

SEQ ID NO: 23782 - protein, 16 aa, Severe acute respiratory syndrome-related coronavirus
  REGION 1..16: note = Table B: HLA-DRB1*09:01L HLA-DRB3*01:01L
  source 1..16: note = Severe acute respiratory syndrome coronavirus 2
TQDHVDILGPLSAQTG

SEQ ID NO: 23783 - protein, 11 aa, Severe acute respiratory syndrome-related coronavirus
  REGION 1..11: note = Table B: HLA-DRB1*09:01L HLA-DPA1*01:03-B1*104:01L
  source 1..11: note = Severe acute respiratory syndrome coronavirus 2
AYYNTTKGGRF

SEQ ID NO: 23784 - protein, 17 aa, Severe acute respiratory syndrome-related coronavirus
  REGION 1..17: note = Table B: HLA-DRB1*09:01L
  source 1..17: note = Severe acute respiratory syndrome coronavirus 2
DLQDLKWARFPKSDGTG

SEQ ID NO: 23785 - protein, 14 aa, Severe acute respiratory syndrome-related coronavirus
  REGION 1..14: note = Table B: HLA-DRB1*09:01L
  source 1..14: note = Severe acute respiratory syndrome coronavirus 2
TDVVYRAFDIYNDK

SEQ ID NO: 23786 - protein, 15 aa, Severe acute respiratory syndrome-related coronavirus
  REGION 1..15: note = Table B: HLA-DRB1*09:01L
  source 1..15: note = Severe acute respiratory syndrome coronavirus 2
FDRYFKYWDQTYHPN

SEQ ID NO: 23787 - protein, 19 aa, Severe acute respiratory syndrome-related coronavirus
  REGION 1..19: note = Table B: HLA-DRB1*09:01L
  source 1..19: note = Severe acute respiratory syndrome coronavirus 2
LPAPRTLLTKGTLEPEYFN

SEQ ID NO: 23788 - protein, 15 aa, Severe acute respiratory syndrome-related coronavirus
  REGION 1..15: note = Table B: HLA-DRB1*09:01L HLA-DRB1*07:01L
  source 1..15: note = Severe acute respiratory syndrome coronavirus 2
LPTQTVDSSQGSEYD

SEQ ID NO: 23789 - protein, 13 aa, Severe acute respiratory syndrome-related coronavirus
  REGION 1..13: note = Table B: HLA-DRB1*09:01L HLA-DRB1*12:02L
  source 1..13: note = Severe acute respiratory syndrome coronavirus 2
FTRLQSLENVAFN

SEQ ID NO: 23790 - protein, 12 aa, Severe acute respiratory syndrome-related coronavirus
  REGION 1..12: note = Table B: HLA-DRB1*09:01L
  source 1..12: note = Severe acute respiratory syndrome coronavirus 2
ELFENKTTLPVN

SEQ ID NO: 23791 - protein, 16 aa, Severe acute respiratory syndrome-related coronavirus
  REGION 1..16: note = Table B: HLA-DRB1*09:01L
  source 1..16: note = Severe acute respiratory syndrome coronavirus 2
GRLIIRENNRVVISSD

SEQ ID NO: 23792 - protein, 14 aa, Severe acute respiratory syndrome-related coronavirus
  REGION 1..14: note = Table B: HLA-DRB1*09:01L HLA-DQA1*05:05-B1*03:01L HLA-DRB1*15:01L
  source 1..14: note = Severe acute respiratory syndrome coronavirus 2
TQNVLYENQKLIAN

SEQ ID NO: 23793 - protein, 13 aa, Severe acute respiratory syndrome-related coronavirus
  REGION 1..13: note = Table B: HLA-DRB1*09:01L HLA-DPA1*01:03-B1*104:01L HLA-DRB1*07:01L
  source 1..13: note = Severe acute respiratory syndrome coronavirus 2
LNTLVKQLSSNFG

SEQ ID NO: 23794 - protein, 18 aa, Severe acute respiratory syndrome-related coronavirus
  REGION 1..18: note = Table B: HLA-DPA1*01:03-B1*04:02L HLA-DPA1*01:03-B1*104:01L
  source 1..18: note = Severe acute respiratory syndrome coronavirus 2
VPGFNEKTHVQLSLPVLQ

SEQ ID NO: 23795 - protein, 18 aa, Severe acute respiratory syndrome-related coronavirus
  REGION 1..18: note = Table B: HLA-DPA1*01:03-B1*04:02L
  source 1..18: note = Severe acute respiratory syndrome coronavirus 2
EKTHVQLSLPVLQVRDVL

SEQ ID NO: 23796 - protein, 15 aa, Severe acute respiratory syndrome-related coronavirus
  REGION 1..15: note = Table B: HLA-DPA1*01:03-B1*04:02L
  source 1..15: note = Severe acute respiratory syndrome coronavirus 2
MGRIRSVYPVASPNE

SEQ ID NO: 23797 - protein, 18 aa, Severe acute respiratory syndrome-related coronavirus
  REGION 1..18: note = Table B: HLA-DPA1*01:03-B1*04:02L HLA-DQA1*03:01-B1*03:02L HLA-DQA1*05:05-B1*03:01L HLA-DQA1*01:03-B1*06:01L
  source 1..18: note = Severe acute respiratory syndrome coronavirus 2
AVVKIYCPACHNSEVGPE

SEQ ID NO: 23798 - protein, 18 aa, Severe acute respiratory syndrome-related coronavirus
  REGION 1..18: note = Table B: HLA-DPA1*01:03-B1*04:02L
  source 1..18: note = Severe acute respiratory syndrome coronavirus 2
GPEHSLAEYHNESGLKTI

SEQ ID NO: 23799 - protein, 12 aa, Severe acute respiratory syndrome-related coronavirus
  REGION 1..12: note = Table B: HLA-DPA1*01:03-B1*04:02L HLA-DPA1*03:01-B1*105:01L HLA-DQA1*05:05-B1*03:01L HLA-DQA1*01:03-B1*06:01L
  source 1..12: note = Severe acute respiratory syndrome coronavirus 2
IAFGGCVFSYVG

SEQ ID NO: 23800 - protein, 15 aa, Severe acute respiratory syndrome-related coronavirus
  REGION 1..15: note = Table B: HLA-DPA1*01:03-B1*04:02L
  source 1..15: note = Severe acute respiratory syndrome coronavirus 2
IAIILASFSASTSAF

SEQ ID NO: 23801 - protein, 14 aa, Severe acute respiratory syndrome-related coronavirus
  REGION 1..14: note = Table B: HLA-DPA1*01:03-B1*04:02L HLA-DPA1*01:03-B1*104:01L
  source 1..14: note = Severe acute respiratory syndrome coronavirus 2
ILASFSASTSAFVE

SEQ ID NO: 23802 - protein, 16 aa, Severe acute respiratory syndrome-related coronavirus
  REGION 1..16: note = Table B: HLA-DPA1*01:03-B1*04:02L
  source 1..16: note = Severe acute respiratory syndrome coronavirus 2
TNNLVVMAYITGGVVQ

SEQ ID NO: 23803 - protein, 12 aa, Severe acute respiratory syndrome-related coronavirus
  REGION 1..12: note = Table B: HLA-DPA1*01:03-B1*04:02L
  source 1..12: note = Severe acute respiratory syndrome coronavirus 2
ITGGVVQLTSQW

SEQ ID NO: 23804 - protein, 16 aa, Severe acute respiratory syndrome-related coronavirus
  REGION 1..16: note = Table B: HLA-DPA1*01:03-B1*04:02L
  source 1..16: note = Severe acute respiratory syndrome coronavirus 2
TGDLQPLEQPTSEAVE

SEQ ID NO: 23805 - protein, 15 aa, Severe acute respiratory syndrome-related coronavirus
  REGION 1..15: note = Table B: HLA-DPA1*01:03-B1*04:02L
  source 1..15: note = Severe acute respiratory syndrome coronavirus 2
KVTFGDDTVIEVQGY

SEQ ID NO: 23806 - protein, 16 aa, Severe acute respiratory syndrome-related coronavirus
  REGION 1..16: note = Table B: HLA-DPA1*01:03-B1*04:02L HLA-DPA1*01:03-B1*104:01L
  source 1..16: note = Severe acute respiratory syndrome coronavirus 2
YLKLTDNVYIKNADIV

SEQ ID NO: 23807 - protein, 16 aa, Severe acute respiratory syndrome-related coronavirus
  REGION 1..16: note = Table B: HLA-DPA1*01:03-B1*04:02L
  source 1..16: note = Severe acute respiratory syndrome coronavirus 2
GDVVQEGVLTAVVIPT

SEQ ID NO: 23808 - protein, 15 aa, Severe acute respiratory syndrome-related coronavirus
  REGION 1..15: note = Table B: HLA-DPA1*01:03-B1*04:02L
  source 1..15: note = Severe acute respiratory syndrome coronavirus 2
KQEILGTVSWNLREM

SEQ ID NO: 23809 - protein, 13 aa, Severe acute respiratory syndrome-related coronavirus
  REGION 1..13: note = Table B: HLA-DPA1*01:03-B1*04:02L
  source 1..13: note = Severe acute respiratory syndrome coronavirus 2
VITFDNLKTLLSL

SEQ ID NO: 23810 - protein, 11 aa, Severe acute respiratory syndrome-related coronavirus
  REGION 1..11: note = Table B: HLA-DPA1*01:03-B1*04:02L
  source 1..11: note = Severe acute respiratory syndrome coronavirus 2
YLATALLTLQQ

SEQ ID NO: 23811 - protein, 16 aa, Severe acute respiratory syndrome-related coronavirus
  REGION 1..16: note = Table B: HLA-DPA1*01:03-B1*04:02L
  source 1..16: note = Severe acute respiratory syndrome coronavirus 2
ALLTLQQIELKFNPPA

SEQ ID NO: 23812 - protein, 15 aa, Severe acute respiratory syndrome-related coronavirus
  REGION 1..15: note = Table B: HLA-DPA1*01:03-B1*04:02L
  source 1..15: note = Severe acute respiratory syndrome coronavirus 2
DVFYKENSYTTTIKP

SEQ ID NO: 23813 - protein, 17 aa, Severe acute respiratory syndrome-related coronavirus
  REGION 1..17: note = Table B: HLA-DPA1*01:03-B1*04:02L
  source 1..17: note = Severe acute respiratory syndrome coronavirus 2
QPYPNASFDNFKFVCDN

SEQ ID NO: 23814 - protein, 13 aa, Severe acute respiratory syndrome-related coronavirus
  REGION 1..13: note = Table B: HLA-DPA1*01:03-B1*04:02L
  source 1..13: note = Severe acute respiratory syndrome coronavirus 2
NLACEDLKPVSEE

SEQ ID NO: 23815 - protein, 18 aa, Severe acute respiratory syndrome-related coronavirus
  REGION 1..18: note = Table B: HLA-DPA1*01:03-B1*04:02L
  source 1..18: note = Severe acute respiratory syndrome coronavirus 2
ENPTIQKDVLECNVKTTE

SEQ ID NO: 23816 - protein, 20 aa, Severe acute respiratory syndrome-related coronavirus
  REGION 1..20: note = Table B: HLA-DPA1*01:03-B1*04:02L HLA-DPA1*01:03-B1*104:01L
  source 1..20: note = Severe acute respiratory syndrome coronavirus 2
NPTIQKDVLECNVKTTEVVG

SEQ ID NO: 23817 - protein, 16 aa, Severe acute respiratory syndrome-related coronavirus
  REGION 1..16: note = Table B: HLA-DPA1*01:03-B1*04:02L HLA-DPA1*01:03-B1*104:01L
  source 1..16: note = Severe acute respiratory syndrome coronavirus 2
LSRVLGLKTLATHGLA

SEQ ID NO: 23818 - protein, 15 aa, Severe acute respiratory syndrome-related coronavirus
  REGION 1..15: note = Table B: HLA-DPA1*01:03-B1*04:02L
  source 1..15: note = Severe acute respiratory syndrome coronavirus 2
DTIANYAKPFLNKVV

SEQ ID NO: 23819 - protein, 16 aa, Severe acute respiratory syndrome-related coronavirus
  REGION 1..16: note = Table B: HLA-DPA1*01:03-B1*04:02L
  source 1..16: note = Severe acute respiratory syndrome coronavirus 2
MPYFFTLLLQLCTFTR

SEQ ID NO: 23820 - protein, 13 aa, Severe acute respiratory syndrome-related coronavirus
  REGION 1..13: note = Table B: HLA-DPA1*01:03-B1*04:02L
  source 1..13: note = Severe acute respiratory syndrome coronavirus 2
LLLQLCTFTRSTN

SEQ ID NO: 23821 - protein, 13 aa, Severe acute respiratory syndrome-related coronavirus
  REGION 1..13: note = Table B: HLA-DPA1*01:03-B1*04:02L HLA-DRB1*04:08L
  source 1..13: note = Severe acute respiratory syndrome coronavirus 2
IQITISSFKWDLT

SEQ ID NO: 23822 - protein, 12 aa, Severe acute respiratory syndrome-related coronavirus
  REGION 1..12: note = Table B: HLA-DPA1*01:03-B1*04:02L
  source 1..12: note = Severe acute respiratory syndrome coronavirus 2
SFKWDLTAFGLV

SEQ ID NO: 23823 - protein, 12 aa, Severe acute respiratory syndrome-related coronavirus
  REGION 1..12: note = Table B: HLA-DPA1*01:03-B1*04:02L
  source 1..12: note = Severe acute respiratory syndrome coronavirus 2
LAYILFTRFFYV

SEQ ID NO: 23824 - protein, 12 aa, Severe acute respiratory syndrome-related coronavirus
  REGION 1..12: note = Table B: HLA-DPA1*01:03-B1*04:02L HLA-DPA1*01:02-B1*04:01L
  source 1..12: note = Severe acute respiratory syndrome coronavirus 2
VHFISNSWLMWL

SEQ ID NO: 23825 - protein, 17 aa, Severe acute respiratory syndrome-related coronavirus
  REGION 1..17: note = Table B: HLA-DPA1*01:03-B1*04:02L HLA-DRB1*08:02L
  source 1..17: note = Severe acute respiratory syndrome coronavirus 2
VARDLSLQFKRPINPTD

SEQ ID NO: 23826 - protein, 14 aa, Severe acute respiratory syndrome-related coronavirus
  REGION 1..14: note = Table B: HLA-DPA1*01:03-B1*04:02L HLA-DRB1*15:03L
  source 1..14: note = Severe acute respiratory syndrome coronavirus 2
SQLMCQPILLLDQA

SEQ ID NO: 23827 - protein, 18 aa, Severe acute respiratory syndrome-related coronavirus
  REGION 1..18: note = Table B: HLA-DPA1*01:03-B1*04:02L
  source 1..18: note = Severe acute respiratory syndrome coronavirus 2
FNVPMEKLKTLVATAEAE

SEQ ID NO: 23828 - protein, 14 aa, Severe acute respiratory syndrome-related coronavirus
  REGION 1..14: note = Table B: HLA-DPA1*01:03-B1*04:02L HLA-DRB3*01:01L HLA-DPA1*01:03-B1*104:01L HLA-DRB1*08:03L
  source 1..14: note = Severe acute respiratory syndrome coronavirus 2
VLSTFISAARQGFV

SEQ ID NO: 23829 - protein, 11 aa, Severe acute respiratory syndrome-related coronavirus
  REGION 1..11: note = Table B: HLA-DPA1*01:03-B1*04:02L HLA-DPA1*03:01-B1*105:01L
  source 1..11: note = Severe acute respiratory syndrome coronavirus 2
WNVKDFMSLSE

SEQ ID NO: 23830 - protein, 16 aa, Severe acute respiratory syndrome-related coronavirus
  REGION 1..16: note = Table B: HLA-DPA1*01:03-B1*04:02L
  source 1..16: note = Severe acute respiratory syndrome coronavirus 2
PNTYLEGSVRVVTTFD

SEQ ID NO: 23831 - protein, 12 aa, Severe acute respiratory syndrome-related coronavirus
  REGION 1..12: note = Table B: HLA-DPA1*01:03-B1*04:02L HLA-DPA1*03:01-B1*105:01L HLA-DQA1*03:01-B1*03:02L
  source 1..12: note = Severe acute respiratory syndrome coronavirus 2
IVAGGIVAIVVT

SEQ ID NO: 23832 - protein, 14 aa, Severe acute respiratory syndrome-related coronavirus
  REGION 1..14: note = Table B: HLA-DPA1*01:03-B1*04:02L
  source 1..14: note = Severe acute respiratory syndrome coronavirus 2
SHVVAFNTLLFLMS

SEQ ID NO: 23833 - protein, 14 aa, Severe acute respiratory syndrome-related coronavirus
  REGION 1..14: note = Table B: HLA-DPA1*01:03-B1*04:02L
  source 1..14: note = Severe acute respiratory syndrome coronavirus 2
VVAFNTLLFLMSFT

SEQ ID NO: 23834 - protein, 16 aa, Severe acute respiratory syndrome-related coronavirus
  REGION 1..16: note = Table B: HLA-DPA1*01:03-B1*04:02L
  source 1..16: note = Severe acute respiratory syndrome coronavirus 2
VPFWITIAYIICISTK

SEQ ID NO: 23835 - protein, 14 aa, Severe acute respiratory syndrome-related coronavirus
  REGION 1..14: note = Table B: HLA-DPA1*01:03-B1*04:02L
  source 1..14: note = Severe acute respiratory syndrome coronavirus 2
WITIAYIICISTKH

SEQ ID NO: 23836 - protein, 15 aa, Severe acute respiratory syndrome-related coronavirus
  REGION 1..15: note = Table B: HLA-DPA1*01:03-B1*04:02L HLA-DPA1*02:01-B1*13:01L
  source 1..15: note = Severe acute respiratory syndrome coronavirus 2
HFYWFFSNYLKRRVV

SEQ ID NO: 23837 - protein, 12 aa, Severe acute respiratory syndrome-related coronavirus
  REGION 1..12: note = Table B: HLA-DPA1*01:03-B1*04:02L HLA-DPA1*01:02-B1*04:01L
  source 1..12: note = Severe acute respiratory syndrome coronavirus 2
STFEEAALCTFL

SEQ ID NO: 23838 - protein, 14 aa, Severe acute respiratory syndrome-related coronavirus
  REGION 1..14: note = Table B: HLA-DPA1*01:03-B1*04:02L
  source 1..14: note = Severe acute respiratory syndrome coronavirus 2
TFEEAALCTFLLNK

SEQ ID NO: 23839 - protein, 12 aa, Severe acute respiratory syndrome-related coronavirus
  REGION 1..12: note = Table B: HLA-DPA1*01:03-B1*04:02L HLA-DQA1*02:01-B1*03:03L
  source 1..12: note = Severe acute respiratory syndrome coronavirus 2
EAALCTFLLNKE

SEQ ID NO: 23840 - protein, 16 aa, Severe acute respiratory syndrome-related coronavirus
  REGION 1..16: note = Table B: HLA-DPA1*01:03-B1*04:02L
  source 1..16: note = Severe acute respiratory syndrome coronavirus 2
LALYNKYKYFSGAMDT

SEQ ID NO: 23841 - protein, 17 aa, Severe acute respiratory syndrome-related coronavirus
  REGION 1..17: note = Table B: HLA-DPA1*01:03-B1*04:02L
  source 1..17: note = Severe acute respiratory syndrome coronavirus 2
TTSYREAACCHLAKALN

SEQ ID NO: 23842 - protein, 14 aa, Severe acute respiratory syndrome-related coronavirus
  REGION 1..14: note = Table B: HLA-DPA1*01:03-B1*04:02L
  source 1..14: note = Severe acute respiratory syndrome coronavirus 2
GLWLDDVVYCPRHV

SEQ ID NO: 23843 - protein, 16 aa, Severe acute respiratory syndrome-related coronavirus
  REGION 1..16: note = Table B: HLA-DPA1*01:03-B1*04:02L
  source 1..16: note = Severe acute respiratory syndrome coronavirus 2
VQLRVIGHSMQNCVLK

SEQ ID NO: 23844 - protein, 14 aa, Severe acute respiratory syndrome-related coronavirus
  REGION 1..14: note = Table B: HLA-DPA1*01:03-B1*04:02L HLA-DQA1*05:05-B1*03:01L
  source 1..14: note = Severe acute respiratory syndrome coronavirus 2
RPNFTIKGSFLNGS

SEQ ID NO: 23845 - protein, 12 aa, Severe acute respiratory syndrome-related coronavirus
  REGION 1..12: note = Table B: HLA-DPA1*01:03-B1*04:02L
  source 1..12: note = Severe acute respiratory syndrome coronavirus 2
NIDYDCVSFCYM

SEQ ID NO: 23846 - protein, 12 aa, Severe acute respiratory syndrome-related coronavirus
  REGION 1..12: note = Table B: HLA-DPA1*01:03-B1*04:02L HLA-DRB1*15:03L
  source 1..12: note = Severe acute respiratory syndrome coronavirus 2
LYENAFLPFAMG

SEQ ID NO: 23847 - protein, 16 aa, Severe acute respiratory syndrome-related coronavirus
  REGION 1..16: note = Table B: HLA-DPA1*01:03-B1*04:02L
  source 1..16: note = Severe acute respiratory syndrome coronavirus 2
IIAMSAFAMMFVKHKH

SEQ ID NO: 23848 - protein, 13 aa, Severe acute respiratory syndrome-related coronavirus
  REGION 1..13: note = Table B: HLA-DPA1*01:03-B1*04:02L
  source 1..13: note = Severe acute respiratory syndrome coronavirus 2
LPSLATVAYFNMV

SEQ ID NO: 23849 - protein, 13 aa, Severe acute respiratory syndrome-related coronavirus
  REGION 1..13: note = Table B: HLA-DPA1*01:03-B1*04:02L
  source 1..13: note = Severe acute respiratory syndrome coronavirus 2
MVYMPASWVMRIM

SEQ ID NO: 23850 - protein, 15 aa, Severe acute respiratory syndrome-related coronavirus
  REGION 1..15: note = Table B: HLA-DPA1*01:03-B1*04:02L
  source 1..15: note = Severe acute respiratory syndrome coronavirus 2
SWVMRIMTWLDMVDT

SEQ ID NO: 23851 - protein, 16 aa, Severe acute respiratory syndrome-related coronavirus
  REGION 1..16: note = Table B: HLA-DPA1*01:03-B1*04:02L
  source 1..16: note = Severe acute respiratory syndrome coronavirus 2
VESSSKLWAQCVQLHN

SEQ ID NO: 23852 - protein, 14 aa, Severe acute respiratory syndrome-related coronavirus
  REGION 1..14: note = Table B: HLA-DPA1*01:03-B1*04:02L
  source 1..14: note = Severe acute respiratory syndrome coronavirus 2
ILLAKDTTEAFEKM

SEQ ID NO: 23853 - protein, 15 aa, Severe acute respiratory syndrome-related coronavirus
  REGION 1..15: note = Table B: HLA-DPA1*01:03-B1*04:02L
  source 1..15: note = Severe acute respiratory syndrome coronavirus 2
DINKLCEEMLDNRAT

SEQ ID NO: 23854 - protein, 14 aa, Severe acute respiratory syndrome-related coronavirus
  REGION 1..14: note = Table B: HLA-DPA1*01:03-B1*04:02L HLA-DQA1*05:05-B1*03:01L HLA-DRB1*15:03L
  source 1..14: note = Severe acute respiratory syndrome coronavirus 2
LQAIASEFSSLPSY

SEQ ID NO: 23855 - protein, 14 aa, Severe acute respiratory syndrome-related coronavirus
  REGION 1..14: note = Table B: HLA-DPA1*01:03-B1*04:02L
  source 1..14: note = Severe acute respiratory syndrome coronavirus 2
AIASEFSSLPSYAA

SEQ ID NO: 23856 - protein, 14 aa, Severe acute respiratory syndrome-related coronavirus
  REGION 1..14: note = Table B: HLA-DPA1*01:03-B1*04:02L HLA-DPA1*01:03-B1*104:01L
  source 1..14: note = Severe acute respiratory syndrome coronavirus 2
SLPSYAAFATAQEA

SEQ ID NO: 23857 - protein, 14 aa, Severe acute respiratory syndrome-related coronavirus
  REGION 1..14: note = Table B: HLA-DPA1*01:03-B1*04:02L HLA-DRB3*01:01L HLA-DPA1*01:03-B1*104:01L HLA-DRB1*08:02L
  source 1..14: note = Severe acute respiratory syndrome coronavirus 2
QEAYEQAVANGDSE

SEQ ID NO: 23858 - protein, 14 aa, Severe acute respiratory syndrome-related coronavirus
  REGION 1..14: note = Table B: HLA-DPA1*01:03-B1*04:02L HLA-DPA1*01:03-B1*104:01L
  source 1..14: note = Severe acute respiratory syndrome coronavirus 2
AYEQAVANGDSEVV

SEQ ID NO: 23859 - protein, 15 aa, Severe acute respiratory syndrome-related coronavirus
  REGION 1..15: note = Table B: HLA-DPA1*01:03-B1*04:02L HLA-DRB1*08:02L
  source 1..15: note = Severe acute respiratory syndrome coronavirus 2
LNNIINNARDGCVPL

SEQ ID NO: 23860 - protein, 14 aa, Severe acute respiratory syndrome-related coronavirus
  REGION 1..14: note = Table B: HLA-DPA1*01:03-B1*04:02L HLA-DRB3*01:01L HLA-DPA1*01:03-B1*104:01L
  source 1..14: note = Severe acute respiratory syndrome coronavirus 2
ALWEIQQVVDADSK

SEQ ID NO: 23861 - protein, 14 aa, Severe acute respiratory syndrome-related coronavirus
  REGION 1..14: note = Table B: HLA-DPA1*01:03-B1*04:02L HLA-DPA1*02:01-B1*13:01L
  source 1..14: note = Severe acute respiratory syndrome coronavirus 2
EETIYNLLKDCPAV

SEQ ID NO: 23862 - protein, 18 aa, Severe acute respiratory syndrome-related coronavirus
  REGION 1..18: note = Table B: HLA-DPA1*01:03-B1*04:02L HLA-DPA1*01:03-B1*104:01L
  source 1..18: note = Severe acute respiratory syndrome coronavirus 2
IDGDMVPHISRQRLTKYT

SEQ ID NO: 23863 - protein, 13 aa, Severe acute respiratory syndrome-related coronavirus
  REGION 1..13: note = Table B: HLA-DPA1*01:03-B1*04:02L HLA-DPA1*01:02-B1*04:01L
  source 1..13: note = Severe acute respiratory syndrome coronavirus 2
LTKYTMADLVYAL

SEQ ID NO: 23864 - protein, 14 aa, Severe acute respiratory syndrome-related coronavirus
  REGION 1..14: note = Table B: HLA-DPA1*01:03-B1*04:02L
  source 1..14: note = Severe acute respiratory syndrome coronavirus 2
GNWYDFGDFIQTTP

SEQ ID NO: 23865 - protein, 14 aa, Severe acute respiratory syndrome-related coronavirus
  REGION 1..14: note = Table B: HLA-DPA1*01:03-B1*04:02L HLA-DRB1*15:03L
  source 1..14: note = Severe acute respiratory syndrome coronavirus 2
PYIKWDLLKYDFTE

SEQ ID NO: 23866 - protein, 13 aa, Severe acute respiratory syndrome-related coronavirus
  REGION 1..13: note = Table B: HLA-DPA1*01:03-B1*04:02L
  source 1..13: note = Severe acute respiratory syndrome coronavirus 2
FNVLFSTVFPPTS

SEQ ID NO: 23867 - protein, 18 aa, Severe acute respiratory syndrome-related coronavirus
  REGION 1..18: note = Table B: HLA-DPA1*01:03-B1*04:02L
  source 1..18: note = Severe acute respiratory syndrome coronavirus 2
ELGVVHNQDVNLHSSRLS

SEQ ID NO: 23868 - protein, 15 aa, Severe acute respiratory syndrome-related coronavirus
  REGION 1..15: note = Table B: HLA-DPA1*01:03-B1*04:02L
  source 1..15: note = Severe acute respiratory syndrome coronavirus 2
SSVELKHFFFAQDGN

SEQ ID NO: 23869 - protein, 16 aa, Severe acute respiratory syndrome-related coronavirus
  REGION 1..16: note = Table B: HLA-DPA1*01:03-B1*04:02L
  source 1..16: note = Severe acute respiratory syndrome coronavirus 2
SVELKHFFFAQDGNAA

SEQ ID NO: 23870 - protein, 15 aa, Severe acute respiratory syndrome-related coronavirus
  REGION 1..15: note = Table B: HLA-DPA1*01:03-B1*04:02L
  source 1..15: note = Severe acute respiratory syndrome coronavirus 2
RLYYDSMSYEDQDAL

SEQ ID NO: 23871 - protein, 17 aa, Severe acute respiratory syndrome-related coronavirus
  REGION 1..17: note = Table B: HLA-DPA1*01:03-B1*04:02L
  source 1..17: note = Severe acute respiratory syndrome coronavirus 2
TKRNVIPTITQMNLKYA

SEQ ID NO: 23872 - protein, 17 aa, Severe acute respiratory syndrome-related coronavirus
  REGION 1..17: note = Table B: HLA-DPA1*01:03-B1*04:02L
  source 1..17: note = Severe acute respiratory syndrome coronavirus 2
HQKLLKSIAATRGATVV

SEQ ID NO: 23873 - protein, 12 aa, Severe acute respiratory syndrome-related coronavirus
  REGION 1..12: note = Table B: HLA-DPA1*01:03-B1*04:02L
  source 1..12: note = Severe acute respiratory syndrome coronavirus 2
YANSVFNICQAV

SEQ ID NO: 23874 - protein, 12 aa, Severe acute respiratory syndrome-related coronavirus
  REGION 1..12: note = Table B: HLA-DPA1*01:03-B1*04:02L
  source 1..12: note = Severe acute respiratory syndrome coronavirus 2
DTDFVNEFYAYL

SEQ ID NO: 23875 - protein, 16 aa, Severe acute respiratory syndrome-related coronavirus
  REGION 1..16: note = Table B: HLA-DPA1*01:03-B1*04:02L
  source 1..16: note = Severe acute respiratory syndrome coronavirus 2
AYLRKHFSMMILSDDA

SEQ ID NO: 23876 - protein, 15 aa, Severe acute respiratory syndrome-related coronavirus
  REGION 1..15: note = Table B: HLA-DPA1*01:03-B1*04:02L
  source 1..15: note = Severe acute respiratory syndrome coronavirus 2
SMMILSDDAVVCFNS

SEQ ID NO: 23877 - protein, 14 aa, Severe acute respiratory syndrome-related coronavirus
  REGION 1..14: note = Table B: HLA-DPA1*01:03-B1*04:02L
  source 1..14: note = Severe acute respiratory syndrome coronavirus 2
VSLAIDAYPLTKHP

SEQ ID NO: 23878 - protein, 11 aa, Severe acute respiratory syndrome-related coronavirus
  REGION 1..11: note = Table B: HLA-DPA1*01:03-B1*04:02L
  source 1..11: note = Severe acute respiratory syndrome coronavirus 2
YADVFHLYLQY

SEQ ID NO: 23879 - protein, 16 aa, Severe acute respiratory syndrome-related coronavirus
  REGION 1..16: note = Table B: HLA-DPA1*01:03-B1*04:02L
  source 1..16: note = Severe acute respiratory syndrome coronavirus 2
HLYLQYIRKLHDELTG

SEQ ID NO: 23880 - protein, 18 aa, Severe acute respiratory syndrome-related coronavirus
  REGION 1..18: note = Table B: HLA-DPA1*01:03-B1*04:02L
  source 1..18: note = Severe acute respiratory syndrome coronavirus 2
TPHTVLQAVGACVLCNSQ

SEQ ID NO: 23881 - protein, 16 aa, Severe acute respiratory syndrome-related coronavirus
  REGION 1..16: note = Table B: HLA-DPA1*01:03-B1*04:02L
  source 1..16: note = Severe acute respiratory syndrome coronavirus 2
YDHVISTSHKLVLSVN

SEQ ID NO: 23882 - protein, 15 aa, Severe acute respiratory syndrome-related coronavirus
  REGION 1..15: note = Table B: HLA-DPA1*01:03-B1*04:02L HLA-DRB1*15:03L
  source 1..15: note = Severe acute respiratory syndrome coronavirus 2
DNVTDFNAIATCDWT

SEQ ID NO: 23883 - protein, 14 aa, Severe acute respiratory syndrome-related coronavirus
  REGION 1..14: note = Table B: HLA-DPA1*01:03-B1*04:02L
  source 1..14: note = Severe acute respiratory syndrome coronavirus 2
NAIATCDWTNAGDY

SEQ ID NO: 23884 - protein, 16 aa, Severe acute respiratory syndrome-related coronavirus
  REGION 1..16: note = Table B: HLA-DPA1*01:03-B1*04:02L
  source 1..16: note = Severe acute respiratory syndrome coronavirus 2
EETFKLSYGIATVREV

SEQ ID NO: 23885 - protein, 16 aa, Severe acute respiratory syndrome-related coronavirus
  REGION 1..16: note = Table B: HLA-DPA1*01:03-B1*04:02L
  source 1..16: note = Severe acute respiratory syndrome coronavirus 2
ETFKLSYGIATVREVL

SEQ ID NO: 23886 - protein, 14 aa, Severe acute respiratory syndrome-related coronavirus
  REGION 1..14: note = Table B: HLA-DPA1*01:03-B1*04:02L HLA-DPA1*01:03-B1*02:01L HLA-DRB1*07:01L HLA-DRB1*08:02L
  source 1..14: note = Severe acute respiratory syndrome coronavirus 2
ALVYDNKLKAHKDK

SEQ ID NO: 23887 - protein, 14 aa, Severe acute respiratory syndrome-related coronavirus
  REGION 1..14: note = Table B: HLA-DPA1*01:03-B1*04:02L HLA-DRB1*08:02L
  source 1..14: note = Severe acute respiratory syndrome coronavirus 2
SPYNSQNAVASKIL

SEQ ID NO: 23888 - protein, 17 aa, Severe acute respiratory syndrome-related coronavirus
  REGION 1..17: note = Table B: HLA-DPA1*01:03-B1*04:02L HLA-DPA1*01:03-B1*104:01L HLA-DQA1*05:05-B1*03:01L
  source 1..17: note = Severe acute respiratory syndrome coronavirus 2
LPWNVVRIKIVQMLSDT

SEQ ID NO: 23889 - protein, 18 aa, Severe acute respiratory syndrome-related coronavirus
  REGION 1..18: note = Table B: HLA-DPA1*01:03-B1*04:02L
  source 1..18: note = Severe acute respiratory syndrome coronavirus 2
IGDELKINAACRKVQHMV

SEQ ID NO: 23890 - protein, 17 aa, Severe acute respiratory syndrome-related coronavirus
  REGION 1..17: note = Table B: HLA-DPA1*01:03-B1*04:02L
  source 1..17: note = Severe acute respiratory syndrome coronavirus 2
VNKHAFHTPAFDKSAFV

SEQ ID NO: 23891 - protein, 15 aa, Severe acute respiratory syndrome-related coronavirus
  REGION 1..15: note = Table B: HLA-DPA1*01:03-B1*04:02L
  source 1..15: note = Severe acute respiratory syndrome coronavirus 2
NMMISAGFSLWVYKQ

SEQ ID NO: 23892 - protein, 14 aa, Severe acute respiratory syndrome-related coronavirus
  REGION 1..14: note = Table B: HLA-DPA1*01:03-B1*04:02L HLA-DPA1*02:01-B1*13:01L HLA-DPA1*01:03-B1*104:01L
  source 1..14: note = Severe acute respiratory syndrome coronavirus 2
ILNNLGVDIAANTV

SEQ ID NO: 23893 - protein, 13 aa, Severe acute respiratory syndrome-related coronavirus
  REGION 1..13: note = Table B: HLA-DPA1*01:03-B1*04:02L
  source 1..13: note = Severe acute respiratory syndrome coronavirus 2
AFEHIVYGDFSHS

SEQ ID NO: 23894 - protein, 13 aa, Severe acute respiratory syndrome-related coronavirus
  REGION 1..13: note = Table B: HLA-DPA1*01:03-B1*04:02L
  source 1..13: note = Severe acute respiratory syndrome coronavirus 2
VYGDFSHSQLGGL

SEQ ID NO: 23895 - protein, 11 aa, Severe acute respiratory syndrome-related coronavirus
  REGION 1..11: note = Table B: HLA-DPA1*01:03-B1*04:02L
  source 1..11: note = Severe acute respiratory syndrome coronavirus 2
FELEDFIPMDS

SEQ ID NO: 23896 - protein, 15 aa, Severe acute respiratory syndrome-related coronavirus
  REGION 1..15: note = Table B: HLA-DPA1*01:03-B1*04:02L
  source 1..15: note = Severe acute respiratory syndrome coronavirus 2
VSKVVKVTIDYTEIS

SEQ ID NO: 23897 - protein, 14 aa, Severe acute respiratory syndrome-related coronavirus
  REGION 1..14: note = Table B: HLA-DPA1*01:03-B1*04:02L
  source 1..14: note = Severe acute respiratory syndrome coronavirus 2
YLNTLTLAVPYNMR

SEQ ID NO: 23898 - protein, 16 aa, Severe acute respiratory syndrome-related coronavirus
  REGION 1..16: note = Table B: HLA-DPA1*01:03-B1*04:02L
  source 1..16: note = Severe acute respiratory syndrome coronavirus 2
VSDADSTLIGDCATVH

SEQ ID NO: 23899 - protein, 18 aa, Severe acute respiratory syndrome-related coronavirus
  REGION 1..18: note = Table B: HLA-DPA1*01:03-B1*04:02L
  source 1..18: note = Severe acute respiratory syndrome coronavirus 2
TANKWDLIISDMYDPKTK

SEQ ID NO: 23900 - protein, 14 aa, Severe acute respiratory syndrome-related coronavirus
  REGION 1..14: note = Table B: HLA-DPA1*01:03-B1*04:02L
  source 1..14: note = Severe acute respiratory syndrome coronavirus 2
FFTYICGFIQQKLA

SEQ ID NO: 23901 - protein, 11 aa, Severe acute respiratory syndrome-related coronavirus
  REGION 1..11: note = Table B: HLA-DPA1*01:03-B1*04:02L HLA-DRB1*12:01L HLA-DRB1*16:01L
  source 1..11: note = Severe acute respiratory syndrome coronavirus 2
HSWNADLYKLM

SEQ ID NO: 23902 - protein, 12 aa, Severe acute respiratory syndrome-related coronavirus
  REGION 1..12: note = Table B: HLA-DPA1*01:03-B1*04:02L
  source 1..12: note = Severe acute respiratory syndrome coronavirus 2
WNADLYKLMGHF

SEQ ID NO: 23903 - protein, 13 aa, Severe acute respiratory syndrome-related coronavirus
  REGION 1..13: note = Table B: HLA-DPA1*01:03-B1*04:02L HLA-DPA1*01:03-B1*104:01L HLA-DPA1*01:02-B1*04:01L
  source 1..13: note = Severe acute respiratory syndrome coronavirus 2
FVTNVNASSSEAF

SEQ ID NO: 23904 - protein, 15 aa, Severe acute respiratory syndrome-related coronavirus
  REGION 1..15: note = Table B: HLA-DPA1*01:03-B1*04:02L HLA-DPA1*01:03-B1*104:01L HLA-DRB1*04:08L
  source 1..15: note = Severe acute respiratory syndrome coronavirus 2
VTNVNASSSEAFLIG

SEQ ID NO: 23905 - protein, 15 aa, Severe acute respiratory syndrome-related coronavirus
  REGION 1..15: note = Table B: HLA-DPA1*01:03-B1*04:02L
  source 1..15: note = Severe acute respiratory syndrome coronavirus 2
AFLIGCNYLGKPREQ

SEQ ID NO: 23906 - protein, 15 aa, Severe acute respiratory syndrome-related coronavirus
  REGION 1..15: note = Table B: HLA-DPA1*01:03-B1*04:02L
  source 1..15: note = Severe acute respiratory syndrome coronavirus 2
VLHSTQDLFLPFFSN

SEQ ID NO: 23907 - protein, 13 aa, Severe acute respiratory syndrome-related coronavirus
  REGION 1..13: note = Table B: HLA-DPA1*01:03-B1*04:02L
  source 1..13: note = Severe acute respiratory syndrome coronavirus 2
LPFFSNVTWFHAI

SEQ ID NO: 23908 - protein, 12 aa, Severe acute respiratory syndrome-related coronavirus
  REGION 1..12: note = Table B: HLA-DPA1*01:03-B1*04:02L HLA-DRB1*15:03L
  source 1..12: note = Severe acute respiratory syndrome coronavirus 2
NIIRGWIFGTTL

SEQ ID NO: 23909 - protein, 12 aa, Severe acute respiratory syndrome-related coronavirus
  REGION 1..12: note = Table B: HLA-DPA1*01:03-B1*04:02L
  source 1..12: note = Severe acute respiratory syndrome coronavirus 2
WMESEFRVYSSA

SEQ ID NO: 23910 - protein, 16 aa, Severe acute respiratory syndrome-related coronavirus
  REGION 1..16: note = Table B: HLA-DPA1*01:03-B1*04:02L
  source 1..16: note = Severe acute respiratory syndrome coronavirus 2
SQPFLMDLEGKQGNFK

SEQ ID NO: 23911 - protein, 18 aa, Severe acute respiratory syndrome-related coronavirus
  REGION 1..18: note = Table B: HLA-DPA1*01:03-B1*04:02L
  source 1..18: note = Severe acute respiratory syndrome coronavirus 2
VFKNIDGYFKIYSKHTPI

SEQ ID NO: 23912 - protein, 16 aa, Severe acute respiratory syndrome-related coronavirus
  REGION 1..16: note = Table B: HLA-DPA1*01:03-B1*04:02L
  source 1..16: note = Severe acute respiratory syndrome coronavirus 2
RKRISNCVADYSVLYN

SEQ ID NO: 23913 - protein, 15 aa, Severe acute respiratory syndrome-related coronavirus
  REGION 1..15: note = Table B: HLA-DPA1*01:03-B1*04:02L HLA-DQA1*05:05-B1*03:01L HLA-DQA1*01:03-B1*06:01L HLA-DRB1*04:08L
  source 1..15: note = Severe acute respiratory syndrome coronavirus 2
VSPTKLNDLCFTNVY

SEQ ID NO: 23914 - protein, 14 aa, Severe acute respiratory syndrome-related coronavirus
  REGION 1..14: note = Table B: HLA-DPA1*01:03-B1*04:02L HLA-DRB1*04:08L
  source 1..14: note = Severe acute respiratory syndrome coronavirus 2
DDFTGCVIAWNSNN

SEQ ID NO: 23915 - protein, 16 aa, Severe acute respiratory syndrome-related coronavirus
  REGION 1..16: note = Table B: HLA-DPA1*01:03-B1*04:02L HLA-DPA1*02:01-B1*13:01L
  source 1..16: note = Severe acute respiratory syndrome coronavirus 2
NYNYLYRLFRKSNLKP

SEQ ID NO: 23916 - protein, 14 aa, Severe acute respiratory syndrome-related coronavirus
  REGION 1..14: note = Table B: HLA-DPA1*01:03-B1*04:02L HLA-DPA1*02:01-B1*13:01L
  source 1..14: note = Severe acute respiratory syndrome coronavirus 2
PFERDISTEIYQAG

SEQ ID NO: 23917 - protein, 13 aa, Severe acute respiratory syndrome-related coronavirus
  REGION 1..13: note = Table B: HLA-DPA1*01:03-B1*04:02L HLA-DQA1*01:03-B1*06:01L
  source 1..13: note = Severe acute respiratory syndrome coronavirus 2
YFPLQSYGFQPTN

SEQ ID NO: 23918 - protein, 14 aa, Severe acute respiratory syndrome-related coronavirus
  REGION 1..14: note = Table B: HLA-DPA1*01:03-B1*04:02L HLA-DQA1*01:03-B1*06:01L
  source 1..14: note = Severe acute respiratory syndrome coronavirus 2
PLQSYGFQPTNGVG

SEQ ID NO: 23919 - protein, 13 aa, Severe acute respiratory syndrome-related coronavirus
  REGION 1..13: note = Table B: HLA-DPA1*01:03-B1*04:02L HLA-DRB1*16:01L
  source 1..13: note = Severe acute respiratory syndrome coronavirus 2
RVVVLSFELLHAP

SEQ ID NO: 23920 - protein, 13 aa, Severe acute respiratory syndrome-related coronavirus
  REGION 1..13: note = Table B: HLA-DPA1*01:03-B1*04:02L HLA-DPA1*02:01-B1*13:01L HLA-DRB1*08:03L
  source 1..13: note = Severe acute respiratory syndrome coronavirus 2
FLPFQQFGRDIAD

SEQ ID NO: 23921 - protein, 13 aa, Severe acute respiratory syndrome-related coronavirus
  REGION 1..13: note = Table B: HLA-DPA1*01:03-B1*04:02L
  source 1..13: note = Severe acute respiratory syndrome coronavirus 2
SFGGVSVITPGTN

SEQ ID NO: 23922 - protein, 16 aa, Severe acute respiratory syndrome-related coronavirus
  REGION 1..16: note = Table B: HLA-DPA1*01:03-B1*04:02L
  source 1..16: note = Severe acute respiratory syndrome coronavirus 2
VFQTRAGCLIGAEHVN

SEQ ID NO: 23923 - protein, 13 aa, Severe acute respiratory syndrome-related coronavirus
  REGION 1..13: note = Table B: HLA-DPA1*01:03-B1*04:02L HLA-DRB1*04:08L
  source 1..13: note = Severe acute respiratory syndrome coronavirus 2
DIPIGAGICASYQ

SEQ ID NO: 23924 - protein, 16 aa, Severe acute respiratory syndrome-related coronavirus
  REGION 1..16: note = Table B: HLA-DPA1*01:03-B1*04:02L
  source 1..16: note = Severe acute respiratory syndrome coronavirus 2
SQSIIAYTMSLGAENS

SEQ ID NO: 23925 - protein, 13 aa, Severe acute respiratory syndrome-related coronavirus
  REGION 1..13: note = Table B: HLA-DPA1*01:03-B1*04:02L
  source 1..13: note = Severe acute respiratory syndrome coronavirus 2
NLLLQYGSFCTQL

SEQ ID NO: 23926 - protein, 12 aa, Severe acute respiratory syndrome-related coronavirus
  REGION 1..12: note = Table B: HLA-DPA1*01:03-B1*04:02L
  source 1..12: note = Severe acute respiratory syndrome coronavirus 2
QYTSALLAGTIT

SEQ ID NO: 23927 - protein, 13 aa, Severe acute respiratory syndrome-related coronavirus
  REGION 1..13: note = Table B: HLA-DPA1*01:03-B1*04:02L
  source 1..13: note = Severe acute respiratory syndrome coronavirus 2
TASALGKLQDVVN

SEQ ID NO: 23928 - protein, 16 aa, Severe acute respiratory syndrome-related coronavirus
  REGION 1..16: note = Table B: HLA-DPA1*01:03-B1*04:02L
  source 1..16: note = Severe acute respiratory syndrome coronavirus 2
LGKLQDVVNQNAQALN

SEQ ID NO: 23929 - protein, 13 aa, Severe acute respiratory syndrome-related coronavirus
  REGION 1..13: note = Table B: HLA-DPA1*01:03-B1*04:02L HLA-DPA1*01:03-B1*104:01L
  source 1..13: note = Severe acute respiratory syndrome coronavirus 2
DVVNQNAQALNTL

SEQ ID NO: 23930 - protein, 16 aa, Severe acute respiratory syndrome-related coronavirus
  REGION 1..16: note = Table B: HLA-DPA1*01:03-B1*04:02L HLA-DPA1*01:03-B1*104:01L
  source 1..16: note = Severe acute respiratory syndrome coronavirus 2
VKQLSSNFGAISSVLN

SEQ ID NO: 23931 - protein, 14 aa, Severe acute respiratory syndrome-related coronavirus
  REGION 1..14: note = Table B: HLA-DPA1*01:03-B1*04:02L
  source 1..14: note = Severe acute respiratory syndrome coronavirus 2
SNFGAISSVLNDIL

SEQ ID NO: 23932 - protein, 14 aa, Severe acute respiratory syndrome-related coronavirus
  REGION 1..14: note = Table B: HLA-DPA1*01:03-B1*04:02L HLA-DQA1*05:05-B1*03:01L
  source 1..14: note = Severe acute respiratory syndrome coronavirus 2
FVTQRNFYEPQIIT

SEQ ID NO: 23933 - protein, 15 aa, Severe acute respiratory syndrome-related coronavirus
  REGION 1..15: note = Table B: HLA-DPA1*01:03-B1*04:02L HLA-DPA1*03:01-B1*105:01L
  source 1..15: note = Severe acute respiratory syndrome coronavirus 2
IAIVMVTIMLCCMTS

SEQ ID NO: 23934 - protein, 14 aa, Severe acute respiratory syndrome-related coronavirus
  REGION 1..14: note = Table B: HLA-DPA1*01:03-B1*04:02L
  source 1..14: note = Severe acute respiratory syndrome coronavirus 2
YALVYFLQSINFVR

SEQ ID NO: 23935 - protein, 11 aa, Severe acute respiratory syndrome-related coronavirus
  REGION 1..11: note = Table B: HLA-DPA1*01:03-B1*04:02L HLA-DPA1*03:01-B1*105:01L
  source 1..11: note = Severe acute respiratory syndrome coronavirus 2
LYDANYFLCWH

SEQ ID NO: 23936 - protein, 15 aa, Severe acute respiratory syndrome-related coronavirus
  REGION 1..15: note = Table B: HLA-DPA1*01:03-B1*04:02L HLA-DPA1*02:01-B1*13:01L
  source 1..15: note = Severe acute respiratory syndrome coronavirus 2
TGVEHVTFFIYNKIV

SEQ ID NO: 23937 - protein, 18 aa, Severe acute respiratory syndrome-related coronavirus
  REGION 1..18: note = Table B: HLA-DPA1*01:03-B1*04:02L HLA-DPA1*01:03-B1*104:01L
  source 1..18: note = Severe acute respiratory syndrome coronavirus 2
NPVMEPIYDEPTTTTSVP

SEQ ID NO: 23938 - protein, 13 aa, Severe acute respiratory syndrome-related coronavirus
  REGION 1..13: note = Table B: HLA-DPA1*01:03-B1*04:02L
  source 1..13: note = Severe acute respiratory syndrome coronavirus 2
VKNLNSSRVPDLL

SEQ ID NO: 23939 - protein, 13 aa, Severe acute respiratory syndrome-related coronavirus
  REGION 1..13: note = Table B: HLA-DPA1*01:03-B1*04:02L
  source 1..13: note = Severe acute respiratory syndrome coronavirus 2
RINWITGGIAIAM

SEQ ID NO: 23940 - protein, 12 aa, Severe acute respiratory syndrome-related coronavirus
  REGION 1..12: note = Table B: HLA-DPA1*01:03-B1*04:02L
  source 1..12: note = Severe acute respiratory syndrome coronavirus 2
LMWLSYFIASFR

SEQ ID NO: 23941 - protein, 18 aa, Severe acute respiratory syndrome-related coronavirus
  REGION 1..18: note = Table B: HLA-DPA1*01:03-B1*04:02L
  source 1..18: note = Severe acute respiratory syndrome coronavirus 2
FRLFARTRSMWSFNPETN

SEQ ID NO: 23942 - protein, 16 aa, Severe acute respiratory syndrome-related coronavirus
  REGION 1..16: note = Table B: HLA-DPA1*01:03-B1*04:02L
  source 1..16: note = Severe acute respiratory syndrome coronavirus 2
RPLLESELVIGAVILR

SEQ ID NO: 23943 - protein, 14 aa, Severe acute respiratory syndrome-related coronavirus
  REGION 1..14: note = Table B: HLA-DPA1*01:03-B1*04:02L HLA-DRB1*08:02L
  source 1..14: note = Severe acute respiratory syndrome coronavirus 2
TLSYYKLGASQRVA

SEQ ID NO: 23944 - protein, 14 aa, Severe acute respiratory syndrome-related coronavirus
  REGION 1..14: note = Table B: HLA-DPA1*01:03-B1*04:02L HLA-DPA1*01:03-B1*104:01L HLA-DRB1*08:02L HLA-DRB1*08:03L
  source 1..14: note = Severe acute respiratory syndrome coronavirus 2
YYKLGASQRVAGDS

SEQ ID NO: 23945 - protein, 13 aa, Severe acute respiratory syndrome-related coronavirus
  REGION 1..13: note = Table B: HLA-DPA1*01:03-B1*04:02L HLA-DPA1*01:02-B1*04:01L
  source 1..13: note = Severe acute respiratory syndrome coronavirus 2
KVSIWNLDYIINL

SEQ ID NO: 23946 - protein, 15 aa, Severe acute respiratory syndrome-related coronavirus
  REGION 1..15: note = Table B: HLA-DPA1*01:03-B1*04:02L
  source 1..15: note = Severe acute respiratory syndrome coronavirus 2
LALITLATCELYHYQ

SEQ ID NO: 23947 - protein, 15 aa, Severe acute respiratory syndrome-related coronavirus
  REGION 1..15: note = Table B: HLA-DPA1*01:03-B1*04:02L HLA-DPA1*02:01-B1*13:01L
  source 1..15: note = Severe acute respiratory syndrome coronavirus 2
GTYEGNSPFHPLADN

SEQ ID NO: 23948 - protein, 16 aa, Severe acute respiratory syndrome-related coronavirus
  REGION 1..16: note = Table B: HLA-DPA1*01:03-B1*04:02L HLA-DRB3*01:01L
  source 1..16: note = Severe acute respiratory syndrome coronavirus 2
ARSVSPKLFIRQEEVQ

SEQ ID NO: 23949 - protein, 17 aa, Severe acute respiratory syndrome-related coronavirus
  REGION 1..17: note = Table B: HLA-DPA1*01:03-B1*04:02L
  source 1..17: note = Severe acute respiratory syndrome coronavirus 2
NYTVSCLPFTINCQEPK

SEQ ID NO: 23950 - protein, 15 aa, Severe acute respiratory syndrome-related coronavirus
  REGION 1..15: note = Table B: HLA-DPA1*01:03-B1*04:02L
  source 1..15: note = Severe acute respiratory syndrome coronavirus 2
LPFTINCQEPKLGSL

SEQ ID NO: 23951 - protein, 16 aa, Severe acute respiratory syndrome-related coronavirus
  REGION 1..16: note = Table B: HLA-DPA1*01:03-B1*04:02L HLA-DRB1*15:03L
  source 1..16: note = Severe acute respiratory syndrome coronavirus 2
EPKLGSLVVRCSFYED

SEQ ID NO: 23952 - protein, 14 aa, Severe acute respiratory syndrome-related coronavirus
  REGION 1..14: note = Table B: HLA-DPA1*01:03-B1*04:02L
  source 1..14: note = Severe acute respiratory syndrome coronavirus 2
SLVVRCSFYEDFLE

SEQ ID NO: 23953 - protein, 16 aa, Severe acute respiratory syndrome-related coronavirus
  REGION 1..16: note = Table B: HLA-DPA1*01:03-B1*04:02L
  source 1..16: note = Severe acute respiratory syndrome coronavirus 2
SPARMAGNGGDAALAL

SEQ ID NO: 23954 - protein, 15 aa, Severe acute respiratory syndrome-related coronavirus
  REGION 1..15: note = Table B: HLA-DPA1*01:03-B1*04:02L
  source 1..15: note = Severe acute respiratory syndrome coronavirus 2
PNFKDQVILLNKHID

SEQ ID NO: 23955 - protein, 16 aa, Severe acute respiratory syndrome-related coronavirus
  REGION 1..16: note = Table B: HLA-DPA1*01:03-B1*04:02L
  source 1..16: note = Severe acute respiratory syndrome coronavirus 2
KKQQTVTLLPAADLDD

SEQ ID NO: 23956 - protein, 17 aa, Severe acute respiratory syndrome-related coronavirus
  REGION 1..17: note = Table B: HLA-DPA1*01:03-B1*04:02L
  source 1..17: note = Severe acute respiratory syndrome coronavirus 2
KQQTVTLLPAADLDDFS

SEQ ID NO: 23957 - protein, 16 aa, Severe acute respiratory syndrome-related coronavirus
  REGION 1..16: note = Table B: HLA-DPA1*01:03-B1*04:02L
  source 1..16: note = Severe acute respiratory syndrome coronavirus 2
TVTLLPAADLDDFSKQ

SEQ ID NO: 23958 - protein, 13 aa, Severe acute respiratory syndrome-related coronavirus
  REGION 1..13: note = Table B: HLA-DPA1*01:03-B1*04:02L
  source 1..13: note = Severe acute respiratory syndrome coronavirus 2
AFPFTIYSLLLCR

SEQ ID NO: 23959 - protein, 13 aa, Severe acute respiratory syndrome-related coronavirus
  REGION 1..13: note = Table B: HLA-DPA1*01:03-B1*04:02L
  source 1..13: note = Severe acute respiratory syndrome coronavirus 2
PFTIYSLLLCRMN

SEQ ID NO: 23960 - protein, 14 aa, Severe acute respiratory syndrome-related coronavirus
  REGION 1..14: note = Table B: HLA-DRB1*12:01L HLA-DPA1*02:01-B1*13:01L HLA-DQA1*02:01-B1*03:03L HLA-DRB1*15:03L
  source 1..14: note = Severe acute respiratory syndrome coronavirus 2
TKRGVYCCREHEHE

SEQ ID NO: 23961 - protein, 13 aa, Severe acute respiratory syndrome-related coronavirus
  REGION 1..13: note = Table B: HLA-DRB1*12:01L
  source 1..13: note = Severe acute respiratory syndrome coronavirus 2
SEKSYELQTPFEI

SEQ ID NO: 23962 - protein, 13 aa, Severe acute respiratory syndrome-related coronavirus
  REGION 1..13: note = Table B: HLA-DRB1*12:01L HLA-DPA1*02:01-B1*13:01L HLA-DPA1*01:02-B1*04:01L HLA-DRB1*16:01L
  source 1..13: note = Severe acute respiratory syndrome coronavirus 2
IKLAKKFDTFNGE

SEQ ID NO: 23963 - protein, 16 aa, Severe acute respiratory syndrome-related coronavirus
  REGION 1..16: note = Table B: HLA-DRB1*12:01L HLA-DPA1*03:01-B1*105:01L HLA-DRB1*15:03L
  source 1..16: note = Severe acute respiratory syndrome coronavirus 2
ENLTKEGATTCGYLPQ

SEQ ID NO: 23964 - protein, 14 aa, Severe acute respiratory syndrome-related coronavirus
  REGION 1..14: note = Table B: HLA-DRB1*12:01L HLA-DRB1*16:01L HLA-DRB1*04:08L HLA-DRB1*15:03L
  source 1..14: note = Severe acute respiratory syndrome coronavirus 2
KTILRKGGRTIAFG

SEQ ID NO: 23965 - protein, 16 aa, Severe acute respiratory syndrome-related coronavirus
  REGION 1..16: note = Table B: HLA-DRB1*12:01L
  source 1..16: note = Severe acute respiratory syndrome coronavirus 2
SEGLNDNLLEILQKEK

SEQ ID NO: 23966 - protein, 12 aa, Severe acute respiratory syndrome-related coronavirus
  REGION 1..12: note = Table B: HLA-DRB1*12:01L
  source 1..12: note = Severe acute respiratory syndrome coronavirus 2
LASFSASTSAFV

SEQ ID NO: 23967 - protein, 10 aa, Severe acute respiratory syndrome-related coronavirus
  REGION 1..10: note = Table B: HLA-DRB1*12:01L HLA-DRB1*15:03L
  source 1..10: note = Severe acute respiratory syndrome coronavirus 2
SLRLIDAMMF

SEQ ID NO: 23968 - protein, 11 aa, Severe acute respiratory syndrome-related coronavirus
  REGION 1..11: note = Table B: HLA-DRB1*12:01L
  source 1..11: note = Severe acute respiratory syndrome coronavirus 2
GGVVQLTSQWL

SEQ ID NO: 23969 - protein, 12 aa, Severe acute respiratory syndrome-related coronavirus
  REGION 1..12: note = Table B: HLA-DRB1*12:01L
  source 1..12: note = Severe acute respiratory syndrome coronavirus 2
LMPLKAPKEIIF

SEQ ID NO: 23970 - protein, 16 aa, Severe acute respiratory syndrome-related coronavirus
  REGION 1..16: note = Table B: HLA-DRB1*12:01L
  source 1..16: note = Severe acute respiratory syndrome coronavirus 2
DLDEWSMATYYLFDES

SEQ ID NO: 23971 - protein, 15 aa, Severe acute respiratory syndrome-related coronavirus
  REGION 1..15: note = Table B: HLA-DRB1*12:01L HLA-DRB1*15:03L
  source 1..15: note = Severe acute respiratory syndrome coronavirus 2
IKNADIVEEAKKVKP

SEQ ID NO: 23972 - protein, 13 aa, Severe acute respiratory syndrome-related coronavirus
  REGION 1..13: note = Table B: HLA-DRB1*12:01L
  source 1..13: note = Severe acute respiratory syndrome coronavirus 2
ATNNAMQVESDDY

SEQ ID NO: 23973 - protein, 15 aa, Severe acute respiratory syndrome-related coronavirus
  REGION 1..15: note = Table B: HLA-DRB1*12:01L HLA-DRB1*15:03L
  source 1..15: note = Severe acute respiratory syndrome coronavirus 2
ADPIHSLRVCVDTVR

SEQ ID NO: 23974 - protein, 15 aa, Severe acute respiratory syndrome-related coronavirus
  REGION 1..15: note = Table B: HLA-DRB1*12:01L HLA-DRB1*15:03L
  source 1..15: note = Severe acute respiratory syndrome coronavirus 2
DPIHSLRVCVDTVRT

SEQ ID NO: 23975 - protein, 13 aa, Severe acute respiratory syndrome-related coronavirus
  REGION 1..13: note = Table B: HLA-DRB1*12:01L
  source 1..13: note = Severe acute respiratory syndrome coronavirus 2
AKTVLKKCKSAFY

SEQ ID NO: 23976 - protein, 12 aa, Severe acute respiratory syndrome-related coronavirus
  REGION 1..12: note = Table B: HLA-DRB1*12:01L
  source 1..12: note = Severe acute respiratory syndrome coronavirus 2
ARFYFYTSKTTV

SEQ ID NO: 23977 - protein, 11 aa, Severe acute respiratory syndrome-related coronavirus
  REGION 1..11: note = Table B: HLA-DRB1*12:01L HLA-DQA1*01:03-B1*06:01L
  source 1..11: note = Severe acute respiratory syndrome coronavirus 2
INTLNDLNETL

SEQ ID NO: 23978 - protein, 15 aa, Severe acute respiratory syndrome-related coronavirus
  REGION 1..15: note = Table B: HLA-DRB1*12:01L HLA-DRB1*04:08L
  source 1..15: note = Severe acute respiratory syndrome coronavirus 2
LEEAARYMRSLKVPA

SEQ ID NO: 23979 - protein, 13 aa, Severe acute respiratory syndrome-related coronavirus
  REGION 1..13: note = Table B: HLA-DRB1*12:01L
  source 1..13: note = Severe acute respiratory syndrome coronavirus 2
LLSLREVRTIKVF

SEQ ID NO: 23980 - protein, 11 aa, Severe acute respiratory syndrome-related coronavirus
  REGION 1..11: note = Table B: HLA-DRB1*12:01L
  source 1..11: note = Severe acute respiratory syndrome coronavirus 2
DTLRVEAFEYY

SEQ ID NO: 23981 - protein, 11 aa, Severe acute respiratory syndrome-related coronavirus
  REGION 1..11: note = Table B: HLA-DRB1*12:01L
  source 1..11: note = Severe acute respiratory syndrome coronavirus 2
PQVNGLTSIKW

SEQ ID NO: 23982 - protein, 12 aa, Severe acute respiratory syndrome-related coronavirus
  REGION 1..12: note = Table B: HLA-DRB1*12:01L
  source 1..12: note = Severe acute respiratory syndrome coronavirus 2
ESPFVMMSAPPA

SEQ ID NO: 23983 - protein, 15 aa, Severe acute respiratory syndrome-related coronavirus
  REGION 1..15: note = Table B: HLA-DRB1*12:01L HLA-DPA1*02:01-B1*13:01L
  source 1..15: note = Severe acute respiratory syndrome coronavirus 2
TYKLDGVVCTEIDPK

SEQ ID NO: 23984 - protein, 12 aa, Severe acute respiratory syndrome-related coronavirus
  REGION 1..12: note = Table B: HLA-DRB1*12:01L HLA-DRB1*12:02L HLA-DRB1*15:03L
  source 1..12: note = Severe acute respiratory syndrome coronavirus 2
EQPIDLVPNQPY

SEQ ID NO: 23985 - protein, 13 aa, Severe acute respiratory syndrome-related coronavirus
  REGION 1..13: note = Table B: HLA-DRB1*12:01L
  source 1..13: note = Severe acute respiratory syndrome coronavirus 2
FDNFKFVCDNIKF

SEQ ID NO: 23986 - protein, 12 aa, Severe acute respiratory syndrome-related coronavirus
  REGION 1..12: note = Table B: HLA-DRB1*12:01L HLA-DRB1*04:08L HLA-DQA1*02:01-B1*03:03L HLA-DRB1*15:03L
  source 1..12: note = Severe acute respiratory syndrome coronavirus 2
DYKHYTPSFKKG

SEQ ID NO: 23987 - protein, 12 aa, Severe acute respiratory syndrome-related coronavirus
  REGION 1..12: note = Table B: HLA-DRB1*12:01L HLA-DRB1*16:01L
  source 1..12: note = Severe acute respiratory syndrome coronavirus 2
IVWHVNNATNKA

SEQ ID NO: 23988 - protein, 13 aa, Severe acute respiratory syndrome-related coronavirus
  REGION 1..13: note = Table B: HLA-DRB1*12:01L HLA-DRB1*15:03L
  source 1..13: note = Severe acute respiratory syndrome coronavirus 2
PTTIAKNTVKSVG

SEQ ID NO: 23989 - protein, 12 aa, Severe acute respiratory syndrome-related coronavirus
  REGION 1..12: note = Table B: HLA-DRB1*12:01L HLA-DRB1*15:03L
  source 1..12: note = Severe acute respiratory syndrome coronavirus 2
VGKFCLEASFNY

SEQ ID NO: 23990 - protein, 11 aa, Severe acute respiratory syndrome-related coronavirus
  REGION 1..11: note = Table B: HLA-DRB1*12:01L
  source 1..11: note = Severe acute respiratory syndrome coronavirus 2
GYLNSTNVTIA

SEQ ID NO: 23991 - protein, 13 aa, Severe acute respiratory syndrome-related coronavirus
  REGION 1..13: note = Table B: HLA-DRB1*12:01L HLA-DPA1*01:03-B1*02:01L
  source 1..13: note = Severe acute respiratory syndrome coronavirus 2
AYILFTRFFYVLG

SEQ ID NO: 23992 - protein, 12 aa, Severe acute respiratory syndrome-related coronavirus
  REGION 1..12: note = Table B: HLA-DRB1*12:01L
  source 1..12: note = Severe acute respiratory syndrome coronavirus 2
VRMYIFFASFYY

SEQ ID NO: 23993 - protein, 12 aa, Severe acute respiratory syndrome-related coronavirus
  REGION 1..12: note = Table B: HLA-DRB1*12:01L
  source 1..12: note = Severe acute respiratory syndrome coronavirus 2
TTIVNGVRRSFY

SEQ ID NO: 23994 - protein, 14 aa, Severe acute respiratory syndrome-related coronavirus
  REGION 1..14: note = Table B: HLA-DRB1*12:01L HLA-DRB1*04:08L HLA-DRB1*15:03L
  source 1..14: note = Severe acute respiratory syndrome coronavirus 2
GKGFCKLHNWNCVN

SEQ ID NO: 23995 - protein, 16 aa, Severe acute respiratory syndrome-related coronavirus
  REGION 1..16: note = Table B: HLA-DRB1*12:01L
  source 1..16: note = Severe acute respiratory syndrome coronavirus 2
NTKGSLPINVIVFDGK

SEQ ID NO: 23996 - protein, 13 aa, Severe acute respiratory syndrome-related coronavirus
  REGION 1..13: note = Table B: HLA-DRB1*12:01L
  source 1..13: note = Severe acute respiratory syndrome coronavirus 2
DIEVTGDSCNNYM

SEQ ID NO: 23997 - protein, 13 aa, Severe acute respiratory syndrome-related coronavirus
  REGION 1..13: note = Table B: HLA-DRB1*12:01L
  source 1..13: note = Severe acute respiratory syndrome coronavirus 2
VNNWLKQLIKVTL

SEQ ID NO: 23998 - protein, 12 aa, Severe acute respiratory syndrome-related coronavirus
  REGION 1..12: note = Table B: HLA-DRB1*12:01L HLA-DRB1*15:03L
  source 1..12: note = Severe acute respiratory syndrome coronavirus 2
AVITREVGFVVP

SEQ ID NO: 23999 - protein, 12 aa, Severe acute respiratory syndrome-related coronavirus
  REGION 1..12: note = Table B: HLA-DRB1*12:01L
  source 1..12: note = Severe acute respiratory syndrome coronavirus 2
VGNICYTPSKLI

SEQ ID NO: 24000 - protein, 13 aa, Severe acute respiratory syndrome-related coronavirus
  REGION 1..13: note = Table B: HLA-DRB1*12:01L HLA-DRB1*15:03L
  source 1..13: note = Severe acute respiratory syndrome coronavirus 2
IVAIVVTCLAYYF

SEQ ID NO: 24001 - protein, 12 aa, Severe acute respiratory syndrome-related coronavirus
  REGION 1..12: note = Table B: HLA-DRB1*12:01L HLA-DPA1*03:01-B1*105:01L HLA-DRB1*15:03L
  source 1..12: note = Severe acute respiratory syndrome coronavirus 2
IVVTCLAYYFMR

SEQ ID NO: 24002 - protein, 13 aa, Severe acute respiratory syndrome-related coronavirus
  REGION 1..13: note = Table B: HLA-DRB1*12:01L HLA-DPA1*02:01-B1*13:01L HLA-DRB1*04:08L HLA-DRB1*15:03L
  source 1..13: note = Severe acute respiratory syndrome coronavirus 2
RFRRAFGEYSHVV

SEQ ID NO: 24003 - protein, 12 aa, Severe acute respiratory syndrome-related coronavirus
  REGION 1..12: note = Table B: HLA-DRB1*12:01L
  source 1..12: note = Severe acute respiratory syndrome coronavirus 2
PVYSFLPGVYSV

SEQ ID NO: 24004 - protein, 13 aa, Severe acute respiratory syndrome-related coronavirus
  REGION 1..13: note = Table B: HLA-DRB1*12:01L
  source 1..13: note = Severe acute respiratory syndrome coronavirus 2
IQWMVMFTPLVPF

SEQ ID NO: 24005 - protein, 12 aa, Severe acute respiratory syndrome-related coronavirus
  REGION 1..12: note = Table B: HLA-DRB1*12:01L HLA-DQA1*05:05-B1*03:01L
  source 1..12: note = Severe acute respiratory syndrome coronavirus 2
VMFTPLVPFWIT

SEQ ID NO: 24006 - protein, 11 aa, Severe acute respiratory syndrome-related coronavirus
  REGION 1..11: note = Table B: HLA-DRB1*12:01L HLA-DQA1*01:03-B1*06:01L
  source 1..11: note = Severe acute respiratory syndrome coronavirus 2
YWFFSNYLKRR

SEQ ID NO: 24007 - protein, 13 aa, Severe acute respiratory syndrome-related coronavirus
  REGION 1..13: note = Table B: HLA-DRB1*12:01L HLA-DRB1*15:03L
  source 1..13: note = Severe acute respiratory syndrome coronavirus 2
YEDLLIRKSNHNF

SEQ ID NO: 24008 - protein, 13 aa, Severe acute respiratory syndrome-related coronavirus
  REGION 1..13: note = Table B: HLA-DRB1*12:01L HLA-DRB1*04:08L
  source 1..13: note = Severe acute respiratory syndrome coronavirus 2
NFYGPFVDRQTAQ

SEQ ID NO: 24009 - protein, 13 aa, Severe acute respiratory syndrome-related coronavirus
  REGION 1..13: note = Table B: HLA-DRB1*12:01L
  source 1..13: note = Severe acute respiratory syndrome coronavirus 2
VKRTIKGTHHWLL

SEQ ID NO: 24010 - protein, 14 aa, Severe acute respiratory syndrome-related coronavirus
  REGION 1..14: note = Table B: HLA-DRB1*12:01L
  source 1..14: note = Severe acute respiratory syndrome coronavirus 2
ATVAYFNMVYMPAS

SEQ ID NO: 24011 - protein, 13 aa, Severe acute respiratory syndrome-related coronavirus
  REGION 1..13: note = Table B: HLA-DRB1*12:01L
  source 1..13: note = Severe acute respiratory syndrome coronavirus 2
YFNMVYMPASWVM

SEQ ID NO: 24012 - protein, 12 aa, Severe acute respiratory syndrome-related coronavirus
  REGION 1..12: note = Table B: HLA-DRB1*12:01L HLA-DPA1*02:01-B1*13:01L
  source 1..12: note = Severe acute respiratory syndrome coronavirus 2
GARRVWTLMNVL

SEQ ID NO: 24013 - protein, 12 aa, Severe acute respiratory syndrome-related coronavirus
  REGION 1..12: note = Table B: HLA-DRB1*12:01L HLA-DPA1*03:01-B1*105:01L
  source 1..12: note = Severe acute respiratory syndrome coronavirus 2
YCPIFFITGNTL

SEQ ID NO: 24014 - protein, 13 aa, Severe acute respiratory syndrome-related coronavirus
  REGION 1..13: note = Table B: HLA-DRB1*12:01L
  source 1..13: note = Severe acute respiratory syndrome coronavirus 2
LNRYFRLTLGVYD

SEQ ID NO: 24015 - protein, 10 aa, Severe acute respiratory syndrome-related coronavirus
  REGION 1..10: note = Table B: HLA-DRB1*12:01L HLA-DRB1*16:01L HLA-DQA1*02:01-B1*03:03L
  source 1..10: note = Severe acute respiratory syndrome coronavirus 2
EFRYMNSQGL

SEQ ID NO: 24016 - protein, 14 aa, Severe acute respiratory syndrome-related coronavirus
  REGION 1..14: note = Table B: HLA-DRB1*12:01L HLA-DPA1*02:01-B1*13:01L
  source 1..14: note = Severe acute respiratory syndrome coronavirus 2
GGKPCIKVATVQSK

SEQ ID NO: 24017 - protein, 12 aa, Severe acute respiratory syndrome-related coronavirus
  REGION 1..12: note = Table B: HLA-DRB1*12:01L
  source 1..12: note = Severe acute respiratory syndrome coronavirus 2
TSVVLLSVLQQL

SEQ ID NO: 24018 - protein, 10 aa, Severe acute respiratory syndrome-related coronavirus
  REGION 1..10: note = Table B: HLA-DRB1*12:01L HLA-DRB1*15:03L
  source 1..10: note = Severe acute respiratory syndrome coronavirus 2
LSVLQQLRVE

SEQ ID NO: 24019 - protein, 11 aa, Severe acute respiratory syndrome-related coronavirus
  REGION 1..11: note = Table B: HLA-DRB1*12:01L HLA-DRB1*10:01L HLA-DRB1*04:08L
  source 1..11: note = Severe acute respiratory syndrome coronavirus 2
DILLAKDTTEA

SEQ ID NO: 24020 - protein, 11 aa, Severe acute respiratory syndrome-related coronavirus
  REGION 1..11: note = Table B: HLA-DRB1*12:01L HLA-DRB1*15:03L
  source 1..11: note = Severe acute respiratory syndrome coronavirus 2
EKMVSLLSVLL

SEQ ID NO: 24021 - protein, 13 aa, Severe acute respiratory syndrome-related coronavirus
  REGION 1..13: note = Table B: HLA-DRB1*12:01L
  source 1..13: note = Severe acute respiratory syndrome coronavirus 2
AVDINKLCEEMLD

SEQ ID NO: 24022 - protein, 13 aa, Severe acute respiratory syndrome-related coronavirus
  REGION 1..13: note = Table B: HLA-DRB1*12:01L HLA-DQA1*05:05-B1*03:01L
  source 1..13: note = Severe acute respiratory syndrome coronavirus 2
PSYAAFATAQEAY

SEQ ID NO: 24023 - protein, 13 aa, Severe acute respiratory syndrome-related coronavirus
  REGION 1..13: note = Table B: HLA-DRB1*12:01L HLA-DPA1*02:01-B1*13:01L HLA-DRB1*15:03L
  source 1..13: note = Severe acute respiratory syndrome coronavirus 2
MQRKLEKMADQAM

SEQ ID NO: 24024 - protein, 16 aa, Severe acute respiratory syndrome-related coronavirus
  REGION 1..16: note = Table B: HLA-DRB1*12:01L HLA-DPA1*02:01-B1*13:01L
  source 1..16: note = Severe acute respiratory syndrome coronavirus 2
SSRLSFKELLVYAADP

SEQ ID NO: 24025 - protein, 14 aa, Severe acute respiratory syndrome-related coronavirus
  REGION 1..14: note = Table B: HLA-DRB1*12:01L
  source 1..14: note = Severe acute respiratory syndrome coronavirus 2
TSKFYGGWHNMLKT

SEQ ID NO: 24026 - protein, 12 aa, Severe acute respiratory syndrome-related coronavirus
  REGION 1..12: note = Table B: HLA-DRB1*12:01L HLA-DRB1*15:03L
  source 1..12: note = Severe acute respiratory syndrome coronavirus 2
PNMLRIMASLVL

SEQ ID NO: 24027 - protein, 12 aa, Severe acute respiratory syndrome-related coronavirus
  REGION 1..12: note = Table B: HLA-DRB1*12:01L HLA-DPA1*02:01-B1*13:01L
  source 1..12: note = Severe acute respiratory syndrome coronavirus 2
GNKIADKYVRNL

SEQ ID NO: 24028 - protein, 11 aa, Severe acute respiratory syndrome-related coronavirus
  REGION 1..11: note = Table B: HLA-DRB1*12:01L
  source 1..11: note = Severe acute respiratory syndrome coronavirus 2
DFVNEFYAYLR

SEQ ID NO: 24029 - protein, 15 aa, Severe acute respiratory syndrome-related coronavirus
  REGION 1..15: note = Table B: HLA-DRB1*12:01L
  source 1..15: note = Severe acute respiratory syndrome coronavirus 2
YAYLRKHFSMMILSD

SEQ ID NO: 24030 - protein, 11 aa, Severe acute respiratory syndrome-related coronavirus
  REGION 1..11: note = Table B: HLA-DRB1*12:01L
  source 1..11: note = Severe acute respiratory syndrome coronavirus 2
YLPYPDPSRIL

SEQ ID NO: 24031 - protein, 18 aa, Severe acute respiratory syndrome-related coronavirus
  REGION 1..18: note = Table B: HLA-DRB1*12:01L HLA-DPA1*01:03-B1*104:01L
  source 1..18: note = Severe acute respiratory syndrome coronavirus 2
LPYPDPSRILGAGCFVDD

SEQ ID NO: 24032 - protein, 12 aa, Severe acute respiratory syndrome-related coronavirus
  REGION 1..12: note = Table B: HLA-DRB1*12:01L HLA-DRB1*16:01L HLA-DRB1*15:03L
  source 1..12: note = Severe acute respiratory syndrome coronavirus 2
TERLKLFAAETL

SEQ ID NO: 24033 - protein, 11 aa, Severe acute respiratory syndrome-related coronavirus
  REGION 1..11: note = Table B: HLA-DRB1*12:01L
  source 1..11: note = Severe acute respiratory syndrome coronavirus 2
RLKLFAAETLK

SEQ ID NO: 24034 - protein, 15 aa, Severe acute respiratory syndrome-related coronavirus
  REGION 1..15: note = Table B: HLA-DRB1*12:01L HLA-DRB1*04:08L
  source 1..15: note = Severe acute respiratory syndrome coronavirus 2
SDRELHLSWEVGKPR

SEQ ID NO: 24035 - protein, 10 aa, Severe acute respiratory syndrome-related coronavirus
  REGION 1..10: note = Table B: HLA-DRB1*12:01L HLA-DRB1*16:01L HLA-DQA1*01:03-B1*06:01L HLA-DQA1*02:01-B1*03:03L HLA-DRB1*15:03L
  source 1..10: note = Severe acute respiratory syndrome coronavirus 2
VYRGTTTYKL

SEQ ID NO: 24036 - protein, 11 aa, Severe acute respiratory syndrome-related coronavirus
  REGION 1..11: note = Table B: HLA-DRB1*12:01L HLA-DRB1*15:03L
  source 1..11: note = Severe acute respiratory syndrome coronavirus 2
FVLTSHTVMPL

SEQ ID NO: 24037 - protein, 14 aa, Severe acute respiratory syndrome-related coronavirus
  REGION 1..14: note = Table B: HLA-DRB1*12:01L HLA-DRB1*04:08L
  source 1..14: note = Severe acute respiratory syndrome coronavirus 2
YVRITGLYPTLNIS

SEQ ID NO: 24038 - protein, 14 aa, Severe acute respiratory syndrome-related coronavirus
  REGION 1..14: note = Table B: HLA-DRB1*12:01L
  source 1..14: note = Severe acute respiratory syndrome coronavirus 2
PQIGVVREFLTRNP

SEQ ID NO: 24039 - protein, 12 aa, Severe acute respiratory syndrome-related coronavirus
  REGION 1..12: note = Table B: HLA-DRB1*12:01L HLA-DRB1*15:03L
  source 1..12: note = Severe acute respiratory syndrome coronavirus 2
YRRLISMMGFKM

SEQ ID NO: 24040 - protein, 12 aa, Severe acute respiratory syndrome-related coronavirus
  REGION 1..12: note = Table B: HLA-DRB1*12:01L HLA-DPA1*03:01-B1*105:01L
  source 1..12: note = Severe acute respiratory syndrome coronavirus 2
DRVVFVLWAHGF

SEQ ID NO: 24041 - protein, 15 aa, Severe acute respiratory syndrome-related coronavirus
  REGION 1..15: note = Table B: HLA-DRB1*12:01L
  source 1..15: note = Severe acute respiratory syndrome coronavirus 2
FELTSMKYFVKIGPE

SEQ ID NO: 24042 - protein, 13 aa, Severe acute respiratory syndrome-related coronavirus
  REGION 1..13: note = Table B: HLA-DRB1*12:01L HLA-DRB1*14:54L HLA-DRB1*04:08L
  source 1..13: note = Severe acute respiratory syndrome coronavirus 2
DVQQWGFTGNLQS

SEQ ID NO: 24043 - protein, 11 aa, Severe acute respiratory syndrome-related coronavirus
  REGION 1..11: note = Table B: HLA-DRB1*12:01L
  source 1..11: note = Severe acute respiratory syndrome coronavirus 2
HVASCDAIMTR

SEQ ID NO: 24044 - protein, 12 aa, Severe acute respiratory syndrome-related coronavirus
  REGION 1..12: note = Table B: HLA-DRB1*12:01L HLA-DPA1*01:02-B1*04:01L
  source 1..12: note = Severe acute respiratory syndrome coronavirus 2
KAYKIEELFYSY

SEQ ID NO: 24045 - protein, 11 aa, Severe acute respiratory syndrome-related coronavirus
  REGION 1..11: note = Table B: HLA-DRB1*12:01L HLA-DPA1*03:01-B1*105:01L HLA-DQA1*02:01-B1*03:03L
  source 1..11: note = Severe acute respiratory syndrome coronavirus 2
DAYNMMISAGF

SEQ ID NO: 24046 - protein, 13 aa, Severe acute respiratory syndrome-related coronavirus
  REGION 1..13: note = Table B: HLA-DRB1*12:01L HLA-DQA1*01:03-B1*06:01L
  source 1..13: note = Severe acute respiratory syndrome coronavirus 2
APAHISTIGVCSM

SEQ ID NO: 24047 - protein, 13 aa, Severe acute respiratory syndrome-related coronavirus
  REGION 1..13: note = Table B: HLA-DRB1*12:01L HLA-DRB1*15:03L
  source 1..13: note = Severe acute respiratory syndrome coronavirus 2
DLFRNARNGVLIT

SEQ ID NO: 24048 - protein, 12 aa, Severe acute respiratory syndrome-related coronavirus
  REGION 1..12: note = Table B: HLA-DRB1*12:01L HLA-DRB1*14:54L
  source 1..12: note = Severe acute respiratory syndrome coronavirus 2
SVVSKVVKVTID

SEQ ID NO: 24049 - protein, 12 aa, Severe acute respiratory syndrome-related coronavirus
  REGION 1..12: note = Table B: HLA-DRB1*12:01L
  source 1..12: note = Severe acute respiratory syndrome coronavirus 2
VVSKVVKVTIDY

SEQ ID NO: 24050 - protein, 13 aa, Severe acute respiratory syndrome-related coronavirus
  REGION 1..13: note = Table B: HLA-DRB1*12:01L HLA-DRB1*04:08L
  source 1..13: note = Severe acute respiratory syndrome coronavirus 2
LAVPYNMRVIHFG

SEQ ID NO: 24051 - protein, 14 aa, Severe acute respiratory syndrome-related coronavirus
  REGION 1..14: note = Table B: HLA-DRB1*12:01L HLA-DRB3*01:01L
  source 1..14: note = Severe acute respiratory syndrome coronavirus 2
ISDMYDPKTKNVTK

SEQ ID NO: 24052 - protein, 13 aa, Severe acute respiratory syndrome-related coronavirus
  REGION 1..13: note = Table B: HLA-DRB1*12:01L
  source 1..13: note = Severe acute respiratory syndrome coronavirus 2
SSYSLFDMSKFPL

SEQ ID NO: 24053 - protein, 13 aa, Severe acute respiratory syndrome-related coronavirus
  REGION 1..13: note = Table B: HLA-DRB1*12:01L
  source 1..13: note = Severe acute respiratory syndrome coronavirus 2
FPLKLRGTAVMSL

SEQ ID NO: 24054 - protein, 14 aa, Severe acute respiratory syndrome-related coronavirus
  REGION 1..14: note = Table B: HLA-DRB1*12:01L HLA-DRB1*04:08L
  source 1..14: note = Severe acute respiratory syndrome coronavirus 2
GQINDMILSLLSKG

SEQ ID NO: 24055 - protein, 11 aa, Severe acute respiratory syndrome-related coronavirus
  REGION 1..11: note = Table B: HLA-DRB1*12:01L
  source 1..11: note = Severe acute respiratory syndrome coronavirus 2
ILSLLSKGRLI

SEQ ID NO: 24056 - protein, 13 aa, Severe acute respiratory syndrome-related coronavirus
  REGION 1..13: note = Table B: HLA-DRB1*12:01L HLA-DPA1*02:01-B1*13:01L
  source 1..13: note = Severe acute respiratory syndrome coronavirus 2
EFQFCNDPFLGVY

SEQ ID NO: 24057 - protein, 12 aa, Severe acute respiratory syndrome-related coronavirus
  REGION 1..12: note = Table B: HLA-DRB1*12:01L HLA-DRB1*04:08L
  source 1..12: note = Severe acute respiratory syndrome coronavirus 2
NKSWMESEFRVY

SEQ ID NO: 24058 - protein, 11 aa, Severe acute respiratory syndrome-related coronavirus
  REGION 1..11: note = Table B: HLA-DRB1*12:01L HLA-DRB1*15:03L
  source 1..11: note = Severe acute respiratory syndrome coronavirus 2
GNFKNLREFVF

SEQ ID NO: 24059 - protein, 10 aa, Severe acute respiratory syndrome-related coronavirus
  REGION 1..10: note = Table B: HLA-DRB1*12:01L HLA-DRB1*15:03L
  source 1..10: note = Severe acute respiratory syndrome coronavirus 2
FKNLREFVFK

SEQ ID NO: 24060 - protein, 10 aa, Severe acute respiratory syndrome-related coronavirus
  REGION 1..10: note = Table B: HLA-DRB1*12:01L HLA-DQA1*03:01-B1*03:02L HLA-DPA1*01:02-B1*04:01L HLA-DRB1*16:01L
  source 1..10: note = Severe acute respiratory syndrome coronavirus 2
RFQTLLALHR

SEQ ID NO: 24061 - protein, 13 aa, Severe acute respiratory syndrome-related coronavirus
  REGION 1..13: note = Table B: HLA-DRB1*12:01L HLA-DRB1*16:01L
  source 1..13: note = Severe acute respiratory syndrome coronavirus 2
VEKGIYQTSNFRV

SEQ ID NO: 24062 - protein, 10 aa, Severe acute respiratory syndrome-related coronavirus
  REGION 1..10: note = Table B: HLA-DRB1*12:01L HLA-DQA1*03:01-B1*03:02L
  source 1..10: note = Severe acute respiratory syndrome coronavirus 2
RFASVYAWNR

SEQ ID NO: 24063 - protein, 14 aa, Severe acute respiratory syndrome-related coronavirus
  REGION 1..14: note = Table B: HLA-DRB1*12:01L HLA-DRB3*01:01L HLA-DPA1*02:01-B1*13:01L HLA-DPA1*01:02-B1*04:01L
  source 1..14: note = Severe acute respiratory syndrome coronavirus 2
RKSNLKPFERDIST

SEQ ID NO: 24064 - protein, 13 aa, Severe acute respiratory syndrome-related coronavirus
  REGION 1..13: note = Table B: HLA-DRB1*12:01L
  source 1..13: note = Severe acute respiratory syndrome coronavirus 2
FNCYFPLQSYGFQ

SEQ ID NO: 24065 - protein, 13 aa, Severe acute respiratory syndrome-related coronavirus
  REGION 1..13: note = Table B: HLA-DRB1*12:01L
  source 1..13: note = Severe acute respiratory syndrome coronavirus 2
TLEILDITPCSFG

SEQ ID NO: 24066 - protein, 12 aa, Severe acute respiratory syndrome-related coronavirus
  REGION 1..12: note = Table B: HLA-DRB1*12:01L
  source 1..12: note = Severe acute respiratory syndrome coronavirus 2
GAALQIPFAMQM

SEQ ID NO: 24067 - protein, 12 aa, Severe acute respiratory syndrome-related coronavirus
  REGION 1..12: note = Table B: HLA-DRB1*12:01L HLA-DRB1*15:03L
  source 1..12: note = Severe acute respiratory syndrome coronavirus 2
LITGRLQSLQTY

SEQ ID NO: 24068 - protein, 13 aa, Severe acute respiratory syndrome-related coronavirus
  REGION 1..13: note = Table B: HLA-DRB1*12:01L HLA-DRB1*15:03L
  source 1..13: note = Severe acute respiratory syndrome coronavirus 2
ELGKYEQYIKWPW

SEQ ID NO: 24069 - protein, 13 aa, Severe acute respiratory syndrome-related coronavirus
  REGION 1..13: note = Table B: HLA-DRB1*12:01L HLA-DRB1*15:03L
  source 1..13: note = Severe acute respiratory syndrome coronavirus 2
IAGLIAIVMVTIM

SEQ ID NO: 24070 - protein, 10 aa, Severe acute respiratory syndrome-related coronavirus
  REGION 1..10: note = Table B: HLA-DRB1*12:01L HLA-DPA1*03:01-B1*105:01L HLA-DRB1*15:03L
  source 1..10: note = Severe acute respiratory syndrome coronavirus 2
FVTVYSHLLL

SEQ ID NO: 24071 - protein, 12 aa, Severe acute respiratory syndrome-related coronavirus
  REGION 1..12: note = Table B: HLA-DRB1*12:01L
  source 1..12: note = Severe acute respiratory syndrome coronavirus 2
LVAAGLEAPFLY

SEQ ID NO: 24072 - protein, 10 aa, Severe acute respiratory syndrome-related coronavirus
  REGION 1..10: note = Table B: HLA-DRB1*12:01L HLA-DQA1*03:01-B1*03:02L HLA-DPA1*01:02-B1*04:01L HLA-DQA1*02:01-B1*03:03L
  source 1..10: note = Severe acute respiratory syndrome coronavirus 2
YFLQSINFVR

SEQ ID NO: 24073 - protein, 12 aa, Severe acute respiratory syndrome-related coronavirus
  REGION 1..12: note = Table B: HLA-DRB1*12:01L
  source 1..12: note = Severe acute respiratory syndrome coronavirus 2
IPYNSVTSSIVI

SEQ ID NO: 24074 - protein, 12 aa, Severe acute respiratory syndrome-related coronavirus
  REGION 1..12: note = Table B: HLA-DRB1*12:01L
  source 1..12: note = Severe acute respiratory syndrome coronavirus 2
LHSYFTSDYYQL

SEQ ID NO: 24075 - protein, 14 aa, Severe acute respiratory syndrome-related coronavirus
  REGION 1..14: note = Table B: HLA-DRB1*12:01L HLA-DRB1*15:03L
  source 1..14: note = Severe acute respiratory syndrome coronavirus 2
ARTRSMWSFNPETN

SEQ ID NO: 24076 - protein, 14 aa, Severe acute respiratory syndrome-related coronavirus
  REGION 1..14: note = Table B: HLA-DRB1*12:01L HLA-DRB1*15:03L
  source 1..14: note = Severe acute respiratory syndrome coronavirus 2
VIGAVILRGHLRIA

SEQ ID NO: 24077 - protein, 12 aa, Severe acute respiratory syndrome-related coronavirus
  REGION 1..12: note = Table B: HLA-DRB1*12:01L
  source 1..12: note = Severe acute respiratory syndrome coronavirus 2
MRTFKVSIWNLD

SEQ ID NO: 24078 - protein, 11 aa, Severe acute respiratory syndrome-related coronavirus
  REGION 1..11: note = Table B: HLA-DRB1*12:01L
  source 1..11: note = Severe acute respiratory syndrome coronavirus 2
NLIIKNLSKSL

SEQ ID NO: 24079 - protein, 12 aa, Severe acute respiratory syndrome-related coronavirus
  REGION 1..12: note = Table B: HLA-DRB1*12:01L
  source 1..12: note = Severe acute respiratory syndrome coronavirus 2
SKSLTENKYSQL

SEQ ID NO: 24080 - protein, 11 aa, Severe acute respiratory syndrome-related coronavirus
  REGION 1..11: note = Table B: HLA-DRB1*12:01L HLA-DPA1*03:01-B1*105:01L HLA-DQA1*01:03-B1*06:01L HLA-DRB1*15:03L
  source 1..11: note = Severe acute respiratory syndrome coronavirus 2
ITLATCELYHY

SEQ ID NO: 24081 - protein, 12 aa, Severe acute respiratory syndrome-related coronavirus
  REGION 1..12: note = Table B: HLA-DRB1*12:01L HLA-DRB1*15:03L
  source 1..12: note = Severe acute respiratory syndrome coronavirus 2
SPIFLIVAAIVF

SEQ ID NO: 24082 - protein, 12 aa, Severe acute respiratory syndrome-related coronavirus
  REGION 1..12: note = Table B: HLA-DRB1*12:01L HLA-DPA1*02:01-B1*13:01L
  source 1..12: note = Severe acute respiratory syndrome coronavirus 2
VGARKSAPLIEL

SEQ ID NO: 24083 - protein, 11 aa, Severe acute respiratory syndrome-related coronavirus
  REGION 1..11: note = Table B: HLA-DRB1*12:01L
  source 1..11: note = Severe acute respiratory syndrome coronavirus 2
DFLEYHDVRVV

SEQ ID NO: 24084 - protein, 10 aa, Severe acute respiratory syndrome-related coronavirus
  REGION 1..10: note = Table B: HLA-DRB1*12:01L
  source 1..10: note = Severe acute respiratory syndrome coronavirus 2
MSDNGPQNQR

SEQ ID NO: 24085 - protein, 14 aa, Severe acute respiratory syndrome-related coronavirus
  REGION 1..14: note = Table B: HLA-DRB1*12:01L
  source 1..14: note = Severe acute respiratory syndrome coronavirus 2
GTGPEAGLPYGANK

SEQ ID NO: 24086 - protein, 13 aa, Severe acute respiratory syndrome-related coronavirus
  REGION 1..13: note = Table B: HLA-DRB1*12:01L
  source 1..13: note = Severe acute respiratory syndrome coronavirus 2
AGLPYGANKDGII

SEQ ID NO: 24087 - protein, 14 aa, Severe acute respiratory syndrome-related coronavirus
  REGION 1..14: note = Table B: HLA-DRB1*12:01L
  source 1..14: note = Severe acute respiratory syndrome coronavirus 2
ASSRSSSRSRNSSR

SEQ ID NO: 24088 - protein, 12 aa, Severe acute respiratory syndrome-related coronavirus
  REGION 1..12: note = Table B: HLA-DRB1*12:01L HLA-DPA1*02:01-B1*13:01L
  source 1..12: note = Severe acute respiratory syndrome coronavirus 2
QKRTATKAYNVT

SEQ ID NO: 24089 - protein, 18 aa, Severe acute respiratory syndrome-related coronavirus
  REGION 1..18: note = Table B: HLA-DRB1*12:01L HLA-DPA1*01:03-B1*104:01L HLA-DRB1*15:03L
  source 1..18: note = Severe acute respiratory syndrome coronavirus 2
LPQRQKKQQTVTLLPAAD

SEQ ID NO: 24090 - protein, 12 aa, Severe acute respiratory syndrome-related coronavirus
  REGION 1..12: note = Table B: HLA-DRB1*12:02L HLA-DRB3*01:01L HLA-DRB1*14:54L
  source 1..12: note = Severe acute respiratory syndrome coronavirus 2
NGNLHPDSATLV

SEQ ID NO: 24091 - protein, 18 aa, Severe acute respiratory syndrome-related coronavirus
  REGION 1..18: note = Table B: HLA-DRB1*12:02L HLA-DRB1*07:01L HLA-DRB1*15:01L
  source 1..18: note = Severe acute respiratory syndrome coronavirus 2
LPINVIVFDGKSKCEESS

SEQ ID NO: 24092 - protein, 13 aa, Severe acute respiratory syndrome-related coronavirus
  REGION 1..13: note = Table B: HLA-DRB1*12:02L HLA-DRB3*01:01L
  source 1..13: note = Severe acute respiratory syndrome coronavirus 2
MLTYNKVENMTPR

SEQ ID NO: 24093 - protein, 12 aa, Severe acute respiratory syndrome-related coronavirus
  REGION 1..12: note = Table B: HLA-DRB1*12:02L
  source 1..12: note = Severe acute respiratory syndrome coronavirus 2
HNFLVQAGNVQL

SEQ ID NO: 24094 - protein, 13 aa, Severe acute respiratory syndrome-related coronavirus
  REGION 1..13: note = Table B: HLA-DRB1*12:02L
  source 1..13: note = Severe acute respiratory syndrome coronavirus 2
FVDRQTAQAAGTD

SEQ ID NO: 24095 - protein, 12 aa, Severe acute respiratory syndrome-related coronavirus
  REGION 1..12: note = Table B: HLA-DRB1*12:02L
  source 1..12: note = Severe acute respiratory syndrome coronavirus 2
FDIYNDKVAGFA

SEQ ID NO: 24096 - protein, 12 aa, Severe acute respiratory syndrome-related coronavirus
  REGION 1..12: note = Table B: HLA-DRB1*12:02L
  source 1..12: note = Severe acute respiratory syndrome coronavirus 2
NQVIVNNLDKSA

SEQ ID NO: 24097 - protein, 12 aa, Severe acute respiratory syndrome-related coronavirus
  REGION 1..12: note = Table B: HLA-DRB1*12:02L HLA-DRB1*14:54L HLA-DRB1*04:08L
  source 1..12: note = Severe acute respiratory syndrome coronavirus 2
LKSIAATRGATV

SEQ ID NO: 24098 - protein, 12 aa, Severe acute respiratory syndrome-related coronavirus
  REGION 1..12: note = Table B: HLA-DRB1*12:02L
  source 1..12: note = Severe acute respiratory syndrome coronavirus 2
ATVVIGTSKFYG

SEQ ID NO: 24099 - protein, 11 aa, Severe acute respiratory syndrome-related coronavirus
  REGION 1..11: note = Table B: HLA-DRB1*12:02L HLA-DRB1*14:54L
  source 1..11: note = Severe acute respiratory syndrome coronavirus 2
RVYSTGSNVFQ

SEQ ID NO: 24100 - protein, 15 aa, Severe acute respiratory syndrome-related coronavirus
  REGION 1..15: note = Table B: HLA-DRB3*01:01L HLA-DRB1*07:01L HLA-DRB1*08:02L
  source 1..15: note = Severe acute respiratory syndrome coronavirus 2
VAELEGIQYGRSGET

SEQ ID NO: 24101 - protein, 15 aa, Severe acute respiratory syndrome-related coronavirus
  REGION 1..15: note = Table B: HLA-DRB3*01:01L
  source 1..15: note = Severe acute respiratory syndrome coronavirus 2
HSYGADLKSFDLGDE

SEQ ID NO: 24102 - protein, 13 aa, Severe acute respiratory syndrome-related coronavirus
  REGION 1..13: note = Table B: HLA-DRB3*01:01L
  source 1..13: note = Severe acute respiratory syndrome coronavirus 2
HEIAWYTERSEKS

SEQ ID NO: 24103 - protein, 15 aa, Severe acute respiratory syndrome-related coronavirus
  REGION 1..15: note = Table B: HLA-DRB3*01:01L
  source 1..15: note = Severe acute respiratory syndrome coronavirus 2
PFEIKLAKKFDTFNG

SEQ ID NO: 24104 - protein, 13 aa, Severe acute respiratory syndrome-related coronavirus
  REGION 1..13: note = Table B: HLA-DRB3*01:01L
  source 1..13: note = Severe acute respiratory syndrome coronavirus 2
TSAFVETVKGLDY

SEQ ID NO: 24105 - protein, 14 aa, Severe acute respiratory syndrome-related coronavirus
  REGION 1..14: note = Table B: HLA-DRB3*01:01L HLA-DPA1*02:01-B1*13:01L
  source 1..14: note = Severe acute respiratory syndrome coronavirus 2
VETVKGLDYKAFKQ

SEQ ID NO: 24106 - protein, 13 aa, Severe acute respiratory syndrome-related coronavirus
  REGION 1..13: note = Table B: HLA-DRB3*01:01L
  source 1..13: note = Severe acute respiratory syndrome coronavirus 2
NITFELDERIDKV

SEQ ID NO: 24107 - protein, 13 aa, Severe acute respiratory syndrome-related coronavirus
  REGION 1..13: note = Table B: HLA-DRB3*01:01L
  source 1..13: note = Severe acute respiratory syndrome coronavirus 2
ITFELDERIDKVL

SEQ ID NO: 24108 - protein, 14 aa, Severe acute respiratory syndrome-related coronavirus
  REGION 1..14: note = Table B: HLA-DRB3*01:01L
  source 1..14: note = Severe acute respiratory syndrome coronavirus 2
KGEDIQLLKSAYEN

SEQ ID NO: 24109 - protein, 15 aa, Severe acute respiratory syndrome-related coronavirus
  REGION 1..15: note = Table B: HLA-DRB3*01:01L HLA-DRB1*08:02L
  source 1..15: note = Severe acute respiratory syndrome coronavirus 2
GEDIQLLKSAYENFN

SEQ ID NO: 24110 - protein, 16 aa, Severe acute respiratory syndrome-related coronavirus
  REGION 1..16: note = Table B: HLA-DRB3*01:01L HLA-DRB1*07:01L HLA-DRB1*10:01L
  source 1..16: note = Severe acute respiratory syndrome coronavirus 2
DIQLLKSAYENFNQHE

SEQ ID NO: 24111 - protein, 16 aa, Severe acute respiratory syndrome-related coronavirus
  REGION 1..16: note = Table B: HLA-DRB3*01:01L
  source 1..16: note = Severe acute respiratory syndrome coronavirus 2
DKNLYDKLVSSFLEMK

SEQ ID NO: 24112 - protein, 16 aa, Severe acute respiratory syndrome-related coronavirus
  REGION 1..16: note = Table B: HLA-DRB3*01:01L HLA-DRB1*15:03L
  source 1..16: note = Severe acute respiratory syndrome coronavirus 2
SKPSVEQRKQDDKKIK

SEQ ID NO: 24113 - protein, 12 aa, Severe acute respiratory syndrome-related coronavirus
  REGION 1..12: note = Table B: HLA-DRB3*01:01L HLA-DRB1*04:08L
  source 1..12: note = Severe acute respiratory syndrome coronavirus 2
TKAIVSTIQRKY

SEQ ID NO: 24114 - protein, 12 aa, Severe acute respiratory syndrome-related coronavirus
  REGION 1..12: note = Table B: HLA-DRB3*01:01L
  source 1..12: note = Severe acute respiratory syndrome coronavirus 2
KAIVSTIQRKYK

SEQ ID NO: 24115 - protein, 12 aa, Severe acute respiratory syndrome-related coronavirus
  REGION 1..12: note = Table B: HLA-DRB3*01:01L
  source 1..12: note = Severe acute respiratory syndrome coronavirus 2
AIVSTIQRKYKG

SEQ ID NO: 24116 - protein, 12 aa, Severe acute respiratory syndrome-related coronavirus
  REGION 1..12: note = Table B: HLA-DRB3*01:01L HLA-DPA1*02:01-B1*13:01L HLA-DRB1*08:03L
  source 1..12: note = Severe acute respiratory syndrome coronavirus 2
ARYMRSLKVPAT

SEQ ID NO: 24117 - protein, 14 aa, Severe acute respiratory syndrome-related coronavirus
  REGION 1..14: note = Table B: HLA-DRB3*01:01L
  source 1..14: note = Severe acute respiratory syndrome coronavirus 2
LGIEFLKRGDKSVY

SEQ ID NO: 24118 - protein, 14 aa, Severe acute respiratory syndrome-related coronavirus
  REGION 1..14: note = Table B: HLA-DRB3*01:01L HLA-DPA1*02:01-B1*13:01L HLA-DPA1*03:01-B1*105:01L HLA-DQA1*01:03-B1*06:01L
  source 1..14: note = Severe acute respiratory syndrome coronavirus 2
FDNLKTLLSLREVR

SEQ ID NO: 24119 - protein, 13 aa, Severe acute respiratory syndrome-related coronavirus
  REGION 1..13: note = Table B: HLA-DRB3*01:01L
  source 1..13: note = Severe acute respiratory syndrome coronavirus 2
FEYYHTTDPSFLG

SEQ ID NO: 24120 - protein, 16 aa, Severe acute respiratory syndrome-related coronavirus
  REGION 1..16: note = Table B: HLA-DRB3*01:01L
  source 1..16: note = Severe acute respiratory syndrome coronavirus 2
VEAVMYMGTLSYEQFK

SEQ ID NO: 24121 - protein, 16 aa, Severe acute respiratory syndrome-related coronavirus
  REGION 1..16: note = Table B: HLA-DRB3*01:01L HLA-DRB1*14:54L
  source 1..16: note = Severe acute respiratory syndrome coronavirus 2
IDGALLTKSSEYKGPI

SEQ ID NO: 24122 - protein, 13 aa, Severe acute respiratory syndrome-related coronavirus
  REGION 1..13: note = Table B: HLA-DRB3*01:01L
  source 1..13: note = Severe acute respiratory syndrome coronavirus 2
NSYTTTIKPVTYK

SEQ ID NO: 24123 - protein, 14 aa, Severe acute respiratory syndrome-related coronavirus
  REGION 1..14: note = Table B: HLA-DRB3*01:01L HLA-DQA1*05:05-B1*03:01L HLA-DRB1*07:01L
  source 1..14: note = Severe acute respiratory syndrome coronavirus 2
DDLNQLTGYKKPAS

SEQ ID NO: 24124 - protein, 14 aa, Severe acute respiratory syndrome-related coronavirus
  REGION 1..14: note = Table B: HLA-DRB3*01:01L HLA-DPA1*01:03-B1*02:01L HLA-DPA1*01:03-B1*104:01L HLA-DRB1*08:02L
  source 1..14: note = Severe acute respiratory syndrome coronavirus 2
VVGDIILKPANNSL

SEQ ID NO: 24125 - protein, 14 aa, Severe acute respiratory syndrome-related coronavirus
  REGION 1..14: note = Table B: HLA-DRB3*01:01L
  source 1..14: note = Severe acute respiratory syndrome coronavirus 2
KAGQKTYERHSLSH

SEQ ID NO: 24126 - protein, 15 aa, Severe acute respiratory syndrome-related coronavirus
  REGION 1..15: note = Table B: HLA-DRB3*01:01L
  source 1..15: note = Severe acute respiratory syndrome coronavirus 2
ERHSLSHFVNLDNLR

SEQ ID NO: 24127 - protein, 16 aa, Severe acute respiratory syndrome-related coronavirus
  REGION 1..16: note = Table B: HLA-DRB3*01:01L
  source 1..16: note = Severe acute respiratory syndrome coronavirus 2
DSAEVAVKMFDAYVNT

SEQ ID NO: 24128 - protein, 15 aa, Severe acute respiratory syndrome-related coronavirus
  REGION 1..15: note = Table B: HLA-DRB3*01:01L HLA-DRB1*04:08L
  source 1..15: note = Severe acute respiratory syndrome coronavirus 2
AKNVSLDNVLSTFIS

SEQ ID NO: 24129 - protein, 14 aa, Severe acute respiratory syndrome-related coronavirus
  REGION 1..14: note = Table B: HLA-DRB3*01:01L
  source 1..14: note = Severe acute respiratory syndrome coronavirus 2
TKDVVECLKLSHQS

SEQ ID NO: 24130 - protein, 14 aa, Severe acute respiratory syndrome-related coronavirus
  REGION 1..14: note = Table B: HLA-DRB3*01:01L
  source 1..14: note = Severe acute respiratory syndrome coronavirus 2
TYNKVENMTPRDLG

SEQ ID NO: 24131 - protein, 13 aa, Severe acute respiratory syndrome-related coronavirus
  REGION 1..13: note = Table B: HLA-DRB3*01:01L
  source 1..13: note = Severe acute respiratory syndrome coronavirus 2
KDFMSLSEQLRKQ

SEQ ID NO: 24132 - protein, 14 aa, Severe acute respiratory syndrome-related coronavirus
  REGION 1..14: note = Table B: HLA-DRB3*01:01L
  source 1..14: note = Severe acute respiratory syndrome coronavirus 2
DFMSLSEQLRKQIR

SEQ ID NO: 24133 - protein, 14 aa, Severe acute respiratory syndrome-related coronavirus
  REGION 1..14: note = Table B: HLA-DRB3*01:01L HLA-DRB1*15:01L
  source 1..14: note = Severe acute respiratory syndrome coronavirus 2
RVVTTFDSEYCRHG

SEQ ID NO: 24134 - protein, 14 aa, Severe acute respiratory syndrome-related coronavirus
  REGION 1..14: note = Table B: HLA-DRB3*01:01L HLA-DPA1*02:01-B1*13:01L
  source 1..14: note = Severe acute respiratory syndrome coronavirus 2
VVTTFDSEYCRHGT

SEQ ID NO: 24135 - protein, 13 aa, Severe acute respiratory syndrome-related coronavirus
  REGION 1..13: note = Table B: HLA-DRB3*01:01L
  source 1..13: note = Severe acute respiratory syndrome coronavirus 2
DVLLPLTQYNRYL

SEQ ID NO: 24136 - protein, 13 aa, Severe acute respiratory syndrome-related coronavirus
  REGION 1..13: note = Table B: HLA-DRB3*01:01L
  source 1..13: note = Severe acute respiratory syndrome coronavirus 2
YNRYLALYNKYKY

SEQ ID NO: 24137 - protein, 13 aa, Severe acute respiratory syndrome-related coronavirus
  REGION 1..13: note = Table B: HLA-DRB3*01:01L
  source 1..13: note = Severe acute respiratory syndrome coronavirus 2
NRYLALYNKYKYF

SEQ ID NO: 24138 - protein, 14 aa, Severe acute respiratory syndrome-related coronavirus
  REGION 1..14: note = Table B: HLA-DRB3*01:01L HLA-DRB1*15:03L
  source 1..14: note = Severe acute respiratory syndrome coronavirus 2
TFQSAVKRTIKGTH

SEQ ID NO: 24139 - protein, 12 aa, Severe acute respiratory syndrome-related coronavirus
  REGION 1..12: note = Table B: HLA-DRB3*01:01L HLA-DRB1*04:08L
  source 1..12: note = Severe acute respiratory syndrome coronavirus 2
ARTVYDDGARRV

SEQ ID NO: 24140 - protein, 13 aa, Severe acute respiratory syndrome-related coronavirus
  REGION 1..13: note = Table B: HLA-DRB3*01:01L HLA-DRB1*04:08L
  source 1..13: note = Severe acute respiratory syndrome coronavirus 2
RTVYDDGARRVWT

SEQ ID NO: 24141 - protein, 14 aa, Severe acute respiratory syndrome-related coronavirus
  REGION 1..14: note = Table B: HLA-DRB3*01:01L HLA-DPA1*01:03-B1*02:01L
  source 1..14: note = Severe acute respiratory syndrome coronavirus 2
LDNRATLQAIASEF

SEQ ID NO: 24142 - protein, 14 aa, Severe acute respiratory syndrome-related coronavirus
  REGION 1..14: note = Table B: HLA-DRB3*01:01L HLA-DRB1*07:01L HLA-DRB1*08:02L
  source 1..14: note = Severe acute respiratory syndrome coronavirus 2
SEFSSLPSYAAFAT

SEQ ID NO: 24143 - protein, 14 aa, Severe acute respiratory syndrome-related coronavirus
  REGION 1..14: note = Table B: HLA-DRB3*01:01L HLA-DRB1*15:03L
  source 1..14: note = Severe acute respiratory syndrome coronavirus 2
NGDSEVVLKKLKKS

SEQ ID NO: 24144 - protein, 14 aa, Severe acute respiratory syndrome-related coronavirus
  REGION 1..14: note = Table B: HLA-DRB3*01:01L
  source 1..14: note = Severe acute respiratory syndrome coronavirus 2
PLIVTALRANSAVK

SEQ ID NO: 24145 - protein, 14 aa, Severe acute respiratory syndrome-related coronavirus
  REGION 1..14: note = Table B: HLA-DRB3*01:01L HLA-DPA1*02:01-B1*13:01L
  source 1..14: note = Severe acute respiratory syndrome coronavirus 2
IVTALRANSAVKLQ

SEQ ID NO: 24146 - protein, 13 aa, Severe acute respiratory syndrome-related coronavirus
  REGION 1..13: note = Table B: HLA-DRB3*01:01L
  source 1..13: note = Severe acute respiratory syndrome coronavirus 2
YFVVKRHTFSNYQ

SEQ ID NO: 24147 - protein, 14 aa, Severe acute respiratory syndrome-related coronavirus
  REGION 1..14: note = Table B: HLA-DRB3*01:01L
  source 1..14: note = Severe acute respiratory syndrome coronavirus 2
FVVKRHTFSNYQHE

SEQ ID NO: 24148 - protein, 14 aa, Severe acute respiratory syndrome-related coronavirus
  REGION 1..14: note = Table B: HLA-DRB3*01:01L
  source 1..14: note = Severe acute respiratory syndrome coronavirus 2
EERLKLFDRYFKYW

SEQ ID NO: 24149 - protein, 16 aa, Severe acute respiratory syndrome-related coronavirus
  REGION 1..16: note = Table B: HLA-DRB3*01:01L
  source 1..16: note = Severe acute respiratory syndrome coronavirus 2
NAAISDYDYYRYNLPT

SEQ ID NO: 24150 - protein, 15 aa, Severe acute respiratory syndrome-related coronavirus
  REGION 1..15: note = Table B: HLA-DRB3*01:01L
  source 1..15: note = Severe acute respiratory syndrome coronavirus 2
ITQMNLKYAISAKNR

SEQ ID NO: 24151 - protein, 14 aa, Severe acute respiratory syndrome-related coronavirus
  REGION 1..14: note = Table B: HLA-DRB3*01:01L
  source 1..14: note = Severe acute respiratory syndrome coronavirus 2
RIMASLVLARKHTT

SEQ ID NO: 24152 - protein, 15 aa, Severe acute respiratory syndrome-related coronavirus
  REGION 1..15: note = Table B: HLA-DRB3*01:01L
  source 1..15: note = Severe acute respiratory syndrome coronavirus 2
ATTAYANSVFNICQA

SEQ ID NO: 24153 - protein, 14 aa, Severe acute respiratory syndrome-related coronavirus
  REGION 1..14: note = Table B: HLA-DRB3*01:01L HLA-DPA1*02:01-B1*13:01L
  source 1..14: note = Severe acute respiratory syndrome coronavirus 2
SQGLVASIKNFKSV

SEQ ID NO: 24154 - protein, 14 aa, Severe acute respiratory syndrome-related coronavirus
  REGION 1..14: note = Table B: HLA-DRB3*01:01L
  source 1..14: note = Severe acute respiratory syndrome coronavirus 2
DAYPLTKHPNQEYA

SEQ ID NO: 24155 - protein, 14 aa, Severe acute respiratory syndrome-related coronavirus
  REGION 1..14: note = Table B: HLA-DRB3*01:01L
  source 1..14: note = Severe acute respiratory syndrome coronavirus 2
VMLTNDNTSRYWEP

SEQ ID NO: 24156 - protein, 14 aa, Severe acute respiratory syndrome-related coronavirus
  REGION 1..14: note = Table B: HLA-DRB3*01:01L HLA-DRB1*08:02L
  source 1..14: note = Severe acute respiratory syndrome coronavirus 2
RIVYTACSHAAVDA

SEQ ID NO: 24157 - protein, 14 aa, Severe acute respiratory syndrome-related coronavirus
  REGION 1..14: note = Table B: HLA-DRB3*01:01L
  source 1..14: note = Severe acute respiratory syndrome coronavirus 2
NYDLSVVNARLRAK

SEQ ID NO: 24158 - protein, 16 aa, Severe acute respiratory syndrome-related coronavirus
  REGION 1..16: note = Table B: HLA-DRB3*01:01L HLA-DPA1*02:01-B1*13:01L
  source 1..16: note = Severe acute respiratory syndrome coronavirus 2
DNKLKAHKDKSAQCFK

SEQ ID NO: 24159 - protein, 13 aa, Severe acute respiratory syndrome-related coronavirus
  REGION 1..13: note = Table B: HLA-DRB3*01:01L
  source 1..13: note = Severe acute respiratory syndrome coronavirus 2
VREFLTRNPAWRK

SEQ ID NO: 24160 - protein, 13 aa, Severe acute respiratory syndrome-related coronavirus
  REGION 1..13: note = Table B: HLA-DRB3*01:01L
  source 1..13: note = Severe acute respiratory syndrome coronavirus 2
KLQFTSLEIPRRN

SEQ ID NO: 24161 - protein, 14 aa, Severe acute respiratory syndrome-related coronavirus
  REGION 1..14: note = Table B: HLA-DRB3*01:01L
  source 1..14: note = Severe acute respiratory syndrome coronavirus 2
LQFTSLEIPRRNVA

SEQ ID NO: 24162 - protein, 14 aa, Severe acute respiratory syndrome-related coronavirus
  REGION 1..14: note = Table B: HLA-DRB3*01:01L
  source 1..14: note = Severe acute respiratory syndrome coronavirus 2
RRNVATLQAENVTG

SEQ ID NO: 24163 - protein, 14 aa, Severe acute respiratory syndrome-related coronavirus
  REGION 1..14: note = Table B: HLA-DRB3*01:01L HLA-DPA1*01:02-B1*04:01L
  source 1..14: note = Severe acute respiratory syndrome coronavirus 2
AKRNIKPVPEVKIL

SEQ ID NO: 24164 - protein, 14 aa, Severe acute respiratory syndrome-related coronavirus
  REGION 1..14: note = Table B: HLA-DRB3*01:01L
  source 1..14: note = Severe acute respiratory syndrome coronavirus 2
VDIAANTVIWDYKR

SEQ ID NO: 24165 - protein, 16 aa, Severe acute respiratory syndrome-related coronavirus
  REGION 1..16: note = Table B: HLA-DRB3*01:01L
  source 1..16: note = Severe acute respiratory syndrome coronavirus 2
VDGVVQQLPETYFTQS

SEQ ID NO: 24166 - protein, 16 aa, Severe acute respiratory syndrome-related coronavirus
  REGION 1..16: note = Table B: HLA-DRB3*01:01L
  source 1..16: note = Severe acute respiratory syndrome coronavirus 2
DGVVQQLPETYFTQSR

SEQ ID NO: 24167 - protein, 15 aa, Severe acute respiratory syndrome-related coronavirus
  REGION 1..15: note = Table B: HLA-DRB3*01:01L
  source 1..15: note = Severe acute respiratory syndrome coronavirus 2
GGLHLLIGLAKRFKE

SEQ ID NO: 24168 - protein, 14 aa, Severe acute respiratory syndrome-related coronavirus
  REGION 1..14: note = Table B: HLA-DRB3*01:01L
  source 1..14: note = Severe acute respiratory syndrome coronavirus 2
DMYDPKTKNVTKEN

SEQ ID NO: 24169 - protein, 14 aa, Severe acute respiratory syndrome-related coronavirus
  REGION 1..14: note = Table B: HLA-DRB3*01:01L
  source 1..14: note = Severe acute respiratory syndrome coronavirus 2
FKIYSKHTPINLVR

SEQ ID NO: 24170 - protein, 15 aa, Severe acute respiratory syndrome-related coronavirus
  REGION 1..15: note = Table B: HLA-DRB3*01:01L
  source 1..15: note = Severe acute respiratory syndrome coronavirus 2
NGLTGTGVLTESNKK

SEQ ID NO: 24171 - protein, 14 aa, Severe acute respiratory syndrome-related coronavirus
  REGION 1..14: note = Table B: HLA-DRB3*01:01L HLA-DRB1*15:01L
  source 1..14: note = Severe acute respiratory syndrome coronavirus 2
NKKFLPFQQFGRDI

SEQ ID NO: 24172 - protein, 14 aa, Severe acute respiratory syndrome-related coronavirus
  REGION 1..14: note = Table B: HLA-DRB3*01:01L HLA-DRB1*15:01L
  source 1..14: note = Severe acute respiratory syndrome coronavirus 2
KKFLPFQQFGRDIA

SEQ ID NO: 24173 - protein, 14 aa, Severe acute respiratory syndrome-related coronavirus
  REGION 1..14: note = Table B: HLA-DRB3*01:01L
  source 1..14: note = Severe acute respiratory syndrome coronavirus 2
DIADTTDAVRDPQT

SEQ ID NO: 24174 - protein, 17 aa, Severe acute respiratory syndrome-related coronavirus
  REGION 1..17: note = Table B: HLA-DRB3*01:01L
  source 1..17: note = Severe acute respiratory syndrome coronavirus 2
DPQTLEILDITPCSFGG

SEQ ID NO: 24175 - protein, 14 aa, Severe acute respiratory syndrome-related coronavirus
  REGION 1..14: note = Table B: HLA-DRB3*01:01L
  source 1..14: note = Severe acute respiratory syndrome coronavirus 2
TPTWRVYSTGSNVF

SEQ ID NO: 24176 - protein, 14 aa, Severe acute respiratory syndrome-related coronavirus
  REGION 1..14: note = Table B: HLA-DRB3*01:01L
  source 1..14: note = Severe acute respiratory syndrome coronavirus 2
GGFNFSQILPDPSK

SEQ ID NO: 24177 - protein, 14 aa, Severe acute respiratory syndrome-related coronavirus
  REGION 1..14: note = Table B: HLA-DRB3*01:01L HLA-DRB1*07:01L
  source 1..14: note = Severe acute respiratory syndrome coronavirus 2
QIPFAMQMAYRFNG

SEQ ID NO: 24178 - protein, 13 aa, Severe acute respiratory syndrome-related coronavirus
  REGION 1..13: note = Table B: HLA-DRB3*01:01L HLA-DPA1*01:03-B1*104:01L HLA-DPA1*01:02-B1*04:01L HLA-DRB1*15:03L
  source 1..13: note = Severe acute respiratory syndrome coronavirus 2
RLDKVEAEVQIDR

SEQ ID NO: 24179 - protein, 14 aa, Severe acute respiratory syndrome-related coronavirus
  REGION 1..14: note = Table B: HLA-DRB3*01:01L
  source 1..14: note = Severe acute respiratory syndrome coronavirus 2
IDRLITGRLQSLQT

SEQ ID NO: 24180 - protein, 13 aa, Severe acute respiratory syndrome-related coronavirus
  REGION 1..13: note = Table B: HLA-DRB3*01:01L
  source 1..13: note = Severe acute respiratory syndrome coronavirus 2
HVTYVPAQEKNFT

SEQ ID NO: 24181 - protein, 15 aa, Severe acute respiratory syndrome-related coronavirus
  REGION 1..15: note = Table B: HLA-DRB3*01:01L
  source 1..15: note = Severe acute respiratory syndrome coronavirus 2
IVNNTVYDPLQPELD

SEQ ID NO: 24182 - protein, 13 aa, Severe acute respiratory syndrome-related coronavirus
  REGION 1..13: note = Table B: HLA-DRB3*01:01L
  source 1..13: note = Severe acute respiratory syndrome coronavirus 2
NTVYDPLQPELDS

SEQ ID NO: 24183 - protein, 12 aa, Severe acute respiratory syndrome-related coronavirus
  REGION 1..12: note = Table B: HLA-DRB3*01:01L
  source 1..12: note = Severe acute respiratory syndrome coronavirus 2
RWQLALSKGVHF

SEQ ID NO: 24184 - protein, 14 aa, Severe acute respiratory syndrome-related coronavirus
  REGION 1..14: note = Table B: HLA-DRB3*01:01L HLA-DRB1*07:01L
  source 1..14: note = Severe acute respiratory syndrome coronavirus 2
GDGTTSPISEHDYQ

SEQ ID NO: 24185 - protein, 13 aa, Severe acute respiratory syndrome-related coronavirus
  REGION 1..13: note = Table B: HLA-DRB3*01:01L
  source 1..13: note = Severe acute respiratory syndrome coronavirus 2
YVYSRVKNLNSSR

SEQ ID NO: 24186 - protein, 14 aa, Severe acute respiratory syndrome-related coronavirus
  REGION 1..14: note = Table B: HLA-DRB3*01:01L HLA-DPA1*01:03-B1*02:01L
  source 1..14: note = Severe acute respiratory syndrome coronavirus 2
NGTITVEELKKLLE

SEQ ID NO: 24187 - protein, 13 aa, Severe acute respiratory syndrome-related coronavirus
  REGION 1..13: note = Table B: HLA-DRB3*01:01L HLA-DRB1*04:08L
  source 1..13: note = Severe acute respiratory syndrome coronavirus 2
GAVILRGHLRIAG

SEQ ID NO: 24188 - protein, 14 aa, Severe acute respiratory syndrome-related coronavirus
  REGION 1..14: note = Table B: HLA-DRB3*01:01L
  source 1..14: note = Severe acute respiratory syndrome coronavirus 2
QRVAGDSGFAAYSR

SEQ ID NO: 24189 - protein, 16 aa, Severe acute respiratory syndrome-related coronavirus
  REGION 1..16: note = Table B: HLA-DRB3*01:01L HLA-DQA1*05:05-B1*03:01L
  source 1..16: note = Severe acute respiratory syndrome coronavirus 2
LSKSLTENKYSQLDEE

SEQ ID NO: 24190 - protein, 14 aa, Severe acute respiratory syndrome-related coronavirus
  REGION 1..14: note = Table B: HLA-DRB3*01:01L
  source 1..14: note = Severe acute respiratory syndrome coronavirus 2
VSPKLFIRQEEVQE

SEQ ID NO: 24191 - protein, 15 aa, Severe acute respiratory syndrome-related coronavirus
  REGION 1..15: note = Table B: HLA-DRB3*01:01L
  source 1..15: note = Severe acute respiratory syndrome coronavirus 2
PCPIHFYSKWYIRVG

SEQ ID NO: 24192 - protein, 12 aa, Severe acute respiratory syndrome-related coronavirus
  REGION 1..12: note = Table B: HLA-DRB3*01:01L HLA-DRB1*15:03L
  source 1..12: note = Severe acute respiratory syndrome coronavirus 2
TALTQHGKEDLK

SEQ ID NO: 24193 - protein, 16 aa, Severe acute respiratory syndrome-related coronavirus
  REGION 1..16: note = Table B: HLA-DRB3*01:01L
  source 1..16: note = Severe acute respiratory syndrome coronavirus 2
RRIRGGDGKMKDLSPR

SEQ ID NO: 24194 - protein, 16 aa, Severe acute respiratory syndrome-related coronavirus
  REGION 1..16: note = Table B: HLA-DRB3*01:01L
  source 1..16: note = Severe acute respiratory syndrome coronavirus 2
SAAEASKKPRQKRTAT

SEQ ID NO: 24195 - protein, 14 aa, Severe acute respiratory syndrome-related coronavirus
  REGION 1..14: note = Table B: HLA-DRB3*01:01L
  source 1..14: note = Severe acute respiratory syndrome coronavirus 2
KAYNVTQAFGRRGP

SEQ ID NO: 24196 - protein, 13 aa, Severe acute respiratory syndrome-related coronavirus
  REGION 1..13: note = Table B: HLA-DRB3*01:01L
  source 1..13: note = Severe acute respiratory syndrome coronavirus 2
FKDQVILLNKHID

SEQ ID NO: 24197 - protein, 16 aa, Severe acute respiratory syndrome-related coronavirus
  REGION 1..16: note = Table B: HLA-DPA1*02:01-B1*13:01L
  source 1..16: note = Severe acute respiratory syndrome coronavirus 2
GLVEVEKGVLPQLEQP

SEQ ID NO: 24198 - protein, 14 aa, Severe acute respiratory syndrome-related coronavirus
  REGION 1..14: note = Table B: HLA-DPA1*02:01-B1*13:01L
  source 1..14: note = Severe acute respiratory syndrome coronavirus 2
LEQPYVFIKRSDAR

SEQ ID NO: 24199 - protein, 14 aa, Severe acute respiratory syndrome-related coronavirus
  REGION 1..14: note = Table B: HLA-DPA1*02:01-B1*13:01L
  source 1..14: note = Severe acute respiratory syndrome coronavirus 2
VFIKRSDARTAPHG

SEQ ID NO: 24200 - protein, 15 aa, Severe acute respiratory syndrome-related coronavirus
  REGION 1..15: note = Table B: HLA-DPA1*02:01-B1*13:01L
  source 1..15: note = Severe acute respiratory syndrome coronavirus 2
FIKRSDARTAPHGHV

SEQ ID NO: 24201 - protein, 18 aa, Severe acute respiratory syndrome-related coronavirus
  REGION 1..18: note = Table B: HLA-DPA1*02:01-B1*13:01L
  source 1..18: note = Severe acute respiratory syndrome coronavirus 2
SDARTAPHGHVMVELVAE

SEQ ID NO: 24202 - protein, 13 aa, Severe acute respiratory syndrome-related coronavirus
  REGION 1..13: note = Table B: HLA-DPA1*02:01-B1*13:01L
  source 1..13: note = Severe acute respiratory syndrome coronavirus 2
GADLKSFDLGDEL

SEQ ID NO: 24203 - protein, 14 aa, Severe acute respiratory syndrome-related coronavirus
  REGION 1..14: note = Table B: HLA-DPA1*02:01-B1*13:01L
  source 1..14: note = Severe acute respiratory syndrome coronavirus 2
GPDGYPLECIKDLL

SEQ ID NO: 24204 - protein, 14 aa, Severe acute respiratory syndrome-related coronavirus
  REGION 1..14: note = Table B: HLA-DPA1*02:01-B1*13:01L
  source 1..14: note = Severe acute respiratory syndrome coronavirus 2
RAGKASCTLSEQLD

SEQ ID NO: 24205 - protein, 10 aa, Severe acute respiratory syndrome-related coronavirus
  REGION 1..10: note = Table B: HLA-DPA1*02:01-B1*13:01L HLA-DQA1*01:03-B1*06:01L HLA-DQA1*02:01-B1*03:03L
  source 1..10: note = Severe acute respiratory syndrome coronavirus 2
PFEIKLAKKF

SEQ ID NO: 24206 - protein, 14 aa, Severe acute respiratory syndrome-related coronavirus
  REGION 1..14: note = Table B: HLA-DPA1*02:01-B1*13:01L
  source 1..14: note = Severe acute respiratory syndrome coronavirus 2
VVGEGSEGLNDNLL

SEQ ID NO: 24207 - protein, 15 aa, Severe acute respiratory syndrome-related coronavirus
  REGION 1..15: note = Table B: HLA-DPA1*02:01-B1*13:01L
  source 1..15: note = Severe acute respiratory syndrome coronavirus 2
GDFKLNEEIAIILAS

SEQ ID NO: 24208 - protein, 14 aa, Severe acute respiratory syndrome-related coronavirus
  REGION 1..14: note = Table B: HLA-DPA1*02:01-B1*13:01L
  source 1..14: note = Severe acute respiratory syndrome coronavirus 2
ASTSAFVETVKGLD

SEQ ID NO: 24209 - protein, 14 aa, Severe acute respiratory syndrome-related coronavirus
  REGION 1..14: note = Table B: HLA-DPA1*02:01-B1*13:01L HLA-DPA1*01:03-B1*104:01L
  source 1..14: note = Severe acute respiratory syndrome coronavirus 2
LQKAAITILDGISQ

SEQ ID NO: 24210 - protein, 15 aa, Severe acute respiratory syndrome-related coronavirus
  REGION 1..15: note = Table B: HLA-DPA1*02:01-B1*13:01L HLA-DPA1*01:03-B1*104:01L
  source 1..15: note = Severe acute respiratory syndrome coronavirus 2
YSLRLIDAMMFTSDL

SEQ ID NO: 24211 - protein, 11 aa, Severe acute respiratory syndrome-related coronavirus
  REGION 1..11: note = Table B: HLA-DPA1*02:01-B1*13:01L
  source 1..11: note = Severe acute respiratory syndrome coronavirus 2
KLKALNLGETF

SEQ ID NO: 24212 - protein, 14 aa, Severe acute respiratory syndrome-related coronavirus
  REGION 1..14: note = Table B: HLA-DPA1*02:01-B1*13:01L
  source 1..14: note = Severe acute respiratory syndrome coronavirus 2
VKSREETGLLMPLK

SEQ ID NO: 24213 - protein, 14 aa, Severe acute respiratory syndrome-related coronavirus
  REGION 1..14: note = Table B: HLA-DPA1*02:01-B1*13:01L HLA-DRB1*15:03L
  source 1..14: note = Severe acute respiratory syndrome coronavirus 2
VTNNTFTLKGGAPT

SEQ ID NO: 24214 - protein, 14 aa, Severe acute respiratory syndrome-related coronavirus
  REGION 1..14: note = Table B: HLA-DPA1*02:01-B1*13:01L
  source 1..14: note = Severe acute respiratory syndrome coronavirus 2
LDERIDKVLNEKCS

SEQ ID NO: 24215 - protein, 15 aa, Severe acute respiratory syndrome-related coronavirus
  REGION 1..15: note = Table B: HLA-DPA1*02:01-B1*13:01L
  source 1..15: note = Severe acute respiratory syndrome coronavirus 2
LNEKCSAYTVELGTE

SEQ ID NO: 24216 - protein, 12 aa, Severe acute respiratory syndrome-related coronavirus
  REGION 1..12: note = Table B: HLA-DPA1*02:01-B1*13:01L
  source 1..12: note = Severe acute respiratory syndrome coronavirus 2
VIKTLQPVSELL

SEQ ID NO: 24217 - protein, 10 aa, Severe acute respiratory syndrome-related coronavirus
  REGION 1..10: note = Table B: HLA-DPA1*02:01-B1*13:01L
  source 1..10: note = Severe acute respiratory syndrome coronavirus 2
EWSMATYYLF

SEQ ID NO: 24218 - protein, 15 aa, Severe acute respiratory syndrome-related coronavirus
  REGION 1..15: note = Table B: HLA-DPA1*02:01-B1*13:01L
  source 1..15: note = Severe acute respiratory syndrome coronavirus 2
ASHMYCSFYPPDEDE

SEQ ID NO: 24219 - protein, 14 aa, Severe acute respiratory syndrome-related coronavirus
  REGION 1..14: note = Table B: HLA-DPA1*02:01-B1*13:01L
  source 1..14: note = Severe acute respiratory syndrome coronavirus 2
AALQPEEEQEEDWL

SEQ ID NO: 24220 - protein, 15 aa, Severe acute respiratory syndrome-related coronavirus
  REGION 1..15: note = Table B: HLA-DPA1*02:01-B1*13:01L
  source 1..15: note = Severe acute respiratory syndrome coronavirus 2
LKLTDNVYIKNADIV

SEQ ID NO: 24221 - protein, 16 aa, Severe acute respiratory syndrome-related coronavirus
  REGION 1..16: note = Table B: HLA-DPA1*02:01-B1*13:01L HLA-DRB1*07:01L
  source 1..16: note = Severe acute respiratory syndrome coronavirus 2
IKNADIVEEAKKVKPT

SEQ ID NO: 24222 - protein, 14 aa, Severe acute respiratory syndrome-related coronavirus
  REGION 1..14: note = Table B: HLA-DPA1*02:01-B1*13:01L
  source 1..14: note = Severe acute respiratory syndrome coronavirus 2
TNNAMQVESDDYIA

SEQ ID NO: 24223 - protein, 15 aa, Severe acute respiratory syndrome-related coronavirus
  REGION 1..15: note = Table B: HLA-DPA1*02:01-B1*13:01L
  source 1..15: note = Severe acute respiratory syndrome coronavirus 2
ENFNQHEVLLAPLLS

SEQ ID NO: 24224 - protein, 15 aa, Severe acute respiratory syndrome-related coronavirus
  REGION 1..15: note = Table B: HLA-DPA1*02:01-B1*13:01L
  source 1..15: note = Severe acute respiratory syndrome coronavirus 2
HSLRVCVDTVRTNVY

SEQ ID NO: 24225 - protein, 19 aa, Severe acute respiratory syndrome-related coronavirus
  REGION 1..19: note = Table B: HLA-DPA1*02:01-B1*13:01L
  source 1..19: note = Severe acute respiratory syndrome coronavirus 2
PFITESKPSVEQRKQDDKK

SEQ ID NO: 24226 - protein, 13 aa, Severe acute respiratory syndrome-related coronavirus
  REGION 1..13: note = Table B: HLA-DPA1*02:01-B1*13:01L
  source 1..13: note = Severe acute respiratory syndrome coronavirus 2
YIDINGNLHPDSA

SEQ ID NO: 24227 - protein, 14 aa, Severe acute respiratory syndrome-related coronavirus
  REGION 1..14: note = Table B: HLA-DPA1*02:01-B1*13:01L
  source 1..14: note = Severe acute respiratory syndrome coronavirus 2
IDINGNLHPDSATL

SEQ ID NO: 24228 - protein, 15 aa, Severe acute respiratory syndrome-related coronavirus
  REGION 1..15: note = Table B: HLA-DPA1*02:01-B1*13:01L HLA-DPA1*01:03-B1*104:01L HLA-DRB1*15:01L
  source 1..15: note = Severe acute respiratory syndrome coronavirus 2
INGNLHPDSATLVSD

SEQ ID NO: 24229 - protein, 13 aa, Severe acute respiratory syndrome-related coronavirus
  REGION 1..13: note = Table B: HLA-DPA1*02:01-B1*13:01L
  source 1..13: note = Severe acute respiratory syndrome coronavirus 2
YGARFYFYTSKTT

SEQ ID NO: 24230 - protein, 12 aa, Severe acute respiratory syndrome-related coronavirus
  REGION 1..12: note = Table B: HLA-DPA1*02:01-B1*13:01L
  source 1..12: note = Severe acute respiratory syndrome coronavirus 2
LINTLNDLNETL

SEQ ID NO: 24231 - protein, 14 aa, Severe acute respiratory syndrome-related coronavirus
  REGION 1..14: note = Table B: HLA-DPA1*02:01-B1*13:01L HLA-DRB1*15:03L
  source 1..14: note = Severe acute respiratory syndrome coronavirus 2
GYVTHGLNLEEAAR

SEQ ID NO: 24232 - protein, 13 aa, Severe acute respiratory syndrome-related coronavirus
  REGION 1..13: note = Table B: HLA-DPA1*02:01-B1*13:01L
  source 1..13: note = Severe acute respiratory syndrome coronavirus 2
IETISLAGSYKDW

SEQ ID NO: 24233 - protein, 16 aa, Severe acute respiratory syndrome-related coronavirus
  REGION 1..16: note = Table B: HLA-DPA1*02:01-B1*13:01L
  source 1..16: note = Severe acute respiratory syndrome coronavirus 2
GQSTQLGIEFLKRGDK

SEQ ID NO: 24234 - protein, 16 aa, Severe acute respiratory syndrome-related coronavirus
  REGION 1..16: note = Table B: HLA-DPA1*02:01-B1*13:01L
  source 1..16: note = Severe acute respiratory syndrome coronavirus 2
LKRGDKSVYYTSNPTT

SEQ ID NO: 24235 - protein, 15 aa, Severe acute respiratory syndrome-related coronavirus
  REGION 1..15: note = Table B: HLA-DPA1*02:01-B1*13:01L
  source 1..15: note = Severe acute respiratory syndrome coronavirus 2
ADVTKIKPHNSHEGK

SEQ ID NO: 24236 - protein, 12 aa, Severe acute respiratory syndrome-related coronavirus
  REGION 1..12: note = Table B: HLA-DPA1*02:01-B1*13:01L HLA-DQA1*01:03-B1*06:01L HLA-DRB1*15:03L
  source 1..12: note = Severe acute respiratory syndrome coronavirus 2
RYMSALNHTKKW

SEQ ID NO: 24237 - protein, 10 aa, Severe acute respiratory syndrome-related coronavirus
  REGION 1..10: note = Table B: HLA-DPA1*02:01-B1*13:01L HLA-DQA1*03:01-B1*03:02L HLA-DRB1*16:01L HLA-DQA1*01:03-B1*06:01L HLA-DQA1*02:01-B1*03:03L
  source 1..10: note = Severe acute respiratory syndrome coronavirus 2
KWKYPQVNGL

SEQ ID NO: 24238 - protein, 15 aa, Severe acute respiratory syndrome-related coronavirus
  REGION 1..15: note = Table B: HLA-DPA1*02:01-B1*13:01L
  source 1..15: note = Severe acute respiratory syndrome coronavirus 2
ILAYCNKTVGELGDV

SEQ ID NO: 24239 - protein, 12 aa, Severe acute respiratory syndrome-related coronavirus
  REGION 1..12: note = Table B: HLA-DPA1*02:01-B1*13:01L
  source 1..12: note = Severe acute respiratory syndrome coronavirus 2
VGELGDVRETMS

SEQ ID NO: 24240 - protein, 14 aa, Severe acute respiratory syndrome-related coronavirus
  REGION 1..14: note = Table B: HLA-DPA1*02:01-B1*13:01L
  source 1..14: note = Severe acute respiratory syndrome coronavirus 2
LKHGTFTCASEYTG

SEQ ID NO: 24241 - protein, 16 aa, Severe acute respiratory syndrome-related coronavirus
  REGION 1..16: note = Table B: HLA-DPA1*02:01-B1*13:01L
  source 1..16: note = Severe acute respiratory syndrome coronavirus 2
GNYQCGHYKHITSKET

SEQ ID NO: 24242 - protein, 11 aa, Severe acute respiratory syndrome-related coronavirus
  REGION 1..11: note = Table B: HLA-DPA1*02:01-B1*13:01L HLA-DQA1*01:03-B1*06:01L HLA-DRB1*15:03L
  source 1..11: note = Severe acute respiratory syndrome coronavirus 2
HYKHITSKETL

SEQ ID NO: 24243 - protein, 14 aa, Severe acute respiratory syndrome-related coronavirus
  REGION 1..14: note = Table B: HLA-DPA1*02:01-B1*13:01L
  source 1..14: note = Severe acute respiratory syndrome coronavirus 2
TTIKPVTYKLDGVV

SEQ ID NO: 24244 - protein, 14 aa, Severe acute respiratory syndrome-related coronavirus
  REGION 1..14: note = Table B: HLA-DPA1*02:01-B1*13:01L
  source 1..14: note = Severe acute respiratory syndrome coronavirus 2
YFTEQPIDLVPNQP

SEQ ID NO: 24245 - protein, 14 aa, Severe acute respiratory syndrome-related coronavirus
  REGION 1..14: note = Table B: HLA-DPA1*02:01-B1*13:01L
  source 1..14: note = Severe acute respiratory syndrome coronavirus 2
FDNFKFVCDNIKFA

SEQ ID NO: 24246 - protein, 13 aa, Severe acute respiratory syndrome-related coronavirus
  REGION 1..13: note = Table B: HLA-DPA1*02:01-B1*13:01L HLA-DQA1*01:03-B1*06:01L
  source 1..13: note = Severe acute respiratory syndrome coronavirus 2
LNQLTGYKKPASR

SEQ ID NO: 24247 - protein, 14 aa, Severe acute respiratory syndrome-related coronavirus
  REGION 1..14: note = Table B: HLA-DPA1*02:01-B1*13:01L HLA-DPA1*03:01-B1*105:01L HLA-DRB1*08:02L
  source 1..14: note = Severe acute respiratory syndrome coronavirus 2
NQLTGYKKPASREL

SEQ ID NO: 24248 - protein, 16 aa, Severe acute respiratory syndrome-related coronavirus
  REGION 1..16: note = Table B: HLA-DPA1*02:01-B1*13:01L
  source 1..16: note = Severe acute respiratory syndrome coronavirus 2
AKLLHKPIVWHVNNAT

SEQ ID NO: 24249 - protein, 14 aa, Severe acute respiratory syndrome-related coronavirus
  REGION 1..14: note = Table B: HLA-DPA1*02:01-B1*13:01L
  source 1..14: note = Severe acute respiratory syndrome coronavirus 2
LHKPIVWHVNNATN

SEQ ID NO: 24250 - protein, 13 aa, Severe acute respiratory syndrome-related coronavirus
  REGION 1..13: note = Table B: HLA-DPA1*02:01-B1*13:01L
  source 1..13: note = Severe acute respiratory syndrome coronavirus 2
DLKPVSEEVVENP

SEQ ID NO: 24251 - protein, 16 aa, Severe acute respiratory syndrome-related coronavirus
  REGION 1..16: note = Table B: HLA-DPA1*02:01-B1*13:01L
  source 1..16: note = Severe acute respiratory syndrome coronavirus 2
DVLECNVKTTEVVGDI

SEQ ID NO: 24252 - protein, 15 aa, Severe acute respiratory syndrome-related coronavirus
  REGION 1..15: note = Table B: HLA-DPA1*02:01-B1*13:01L
  source 1..15: note = Severe acute respiratory syndrome coronavirus 2
IILKPANNSLKITEE

SEQ ID NO: 24253 - protein, 13 aa, Severe acute respiratory syndrome-related coronavirus
  REGION 1..13: note = Table B: HLA-DPA1*02:01-B1*13:01L
  source 1..13: note = Severe acute respiratory syndrome coronavirus 2
LKITEEVGHTDLM

SEQ ID NO: 24254 - protein, 12 aa, Severe acute respiratory syndrome-related coronavirus
  REGION 1..12: note = Table B: HLA-DPA1*02:01-B1*13:01L HLA-DPA1*01:03-B1*104:01L
  source 1..12: note = Severe acute respiratory syndrome coronavirus 2
KVVSTTTNIVTR

SEQ ID NO: 24255 - protein, 14 aa, Severe acute respiratory syndrome-related coronavirus
  REGION 1..14: note = Table B: HLA-DPA1*02:01-B1*13:01L HLA-DPA1*01:02-B1*04:01L
  source 1..14: note = Severe acute respiratory syndrome coronavirus 2
SRIKASMPTTIAKN

SEQ ID NO: 24256 - protein, 14 aa, Severe acute respiratory syndrome-related coronavirus
  REGION 1..14: note = Table B: HLA-DPA1*02:01-B1*13:01L HLA-DPA1*03:01-B1*105:01L HLA-DQA1*01:03-B1*06:01L
  source 1..14: note = Severe acute respiratory syndrome coronavirus 2
VKSVGKFCLEASFN

SEQ ID NO: 24257 - protein, 11 aa, Severe acute respiratory syndrome-related coronavirus
  REGION 1..11: note = Table B: HLA-DPA1*02:01-B1*13:01L
  source 1..11: note = Severe acute respiratory syndrome coronavirus 2
YPSLETIQITI

SEQ ID NO: 24258 - protein, 10 aa, Severe acute respiratory syndrome-related coronavirus
  REGION 1..10: note = Table B: HLA-DPA1*02:01-B1*13:01L HLA-DQA1*01:03-B1*06:01L
  source 1..10: note = Severe acute respiratory syndrome coronavirus 2
IFFASFYYVW

SEQ ID NO: 24259 - protein, 13 aa, Severe acute respiratory syndrome-related coronavirus
  REGION 1..13: note = Table B: HLA-DPA1*02:01-B1*13:01L
  source 1..13: note = Severe acute respiratory syndrome coronavirus 2
LQFKRPINPTDQS

SEQ ID NO: 24260 - protein, 16 aa, Severe acute respiratory syndrome-related coronavirus
  REGION 1..16: note = Table B: HLA-DPA1*02:01-B1*13:01L
  source 1..16: note = Severe acute respiratory syndrome coronavirus 2
PILLLDQALVSDVGDS

SEQ ID NO: 24261 - protein, 14 aa, Severe acute respiratory syndrome-related coronavirus
  REGION 1..14: note = Table B: HLA-DPA1*02:01-B1*13:01L HLA-DPA1*03:01-B1*105:01L
  source 1..14: note = Severe acute respiratory syndrome coronavirus 2
LDQALVSDVGDSAE

SEQ ID NO: 24262 - protein, 13 aa, Severe acute respiratory syndrome-related coronavirus
  REGION 1..13: note = Table B: HLA-DPA1*02:01-B1*13:01L
  source 1..13: note = Severe acute respiratory syndrome coronavirus 2
LTYNKVENMTPRD

SEQ ID NO: 24263 - protein, 14 aa, Severe acute respiratory syndrome-related coronavirus
  REGION 1..14: note = Table B: HLA-DPA1*02:01-B1*13:01L
  source 1..14: note = Severe acute respiratory syndrome coronavirus 2
RHINAQVAKSHNIA

SEQ ID NO: 24264 - protein, 13 aa, Severe acute respiratory syndrome-related coronavirus
  REGION 1..13: note = Table B: HLA-DPA1*02:01-B1*13:01L
  source 1..13: note = Severe acute respiratory syndrome coronavirus 2
QVAKSHNIALIWN

SEQ ID NO: 24265 - protein, 15 aa, Severe acute respiratory syndrome-related coronavirus
  REGION 1..15: note = Table B: HLA-DPA1*02:01-B1*13:01L
  source 1..15: note = Severe acute respiratory syndrome coronavirus 2
KQIRSAAKKNNLPFK

SEQ ID NO: 24266 - protein, 15 aa, Severe acute respiratory syndrome-related coronavirus
  REGION 1..15: note = Table B: HLA-DPA1*02:01-B1*13:01L
  source 1..15: note = Severe acute respiratory syndrome coronavirus 2
TDTCFANKHADFDTW

SEQ ID NO: 24267 - protein, 12 aa, Severe acute respiratory syndrome-related coronavirus
  REGION 1..12: note = Table B: HLA-DPA1*02:01-B1*13:01L
  source 1..12: note = Severe acute respiratory syndrome coronavirus 2
GSYTNDKACPLI

SEQ ID NO: 24268 - protein, 16 aa, Severe acute respiratory syndrome-related coronavirus
  REGION 1..16: note = Table B: HLA-DPA1*02:01-B1*13:01L
  source 1..16: note = Severe acute respiratory syndrome coronavirus 2
VLAAECTIFKDASGKP

SEQ ID NO: 24269 - protein, 14 aa, Severe acute respiratory syndrome-related coronavirus
  REGION 1..14: note = Table B: HLA-DPA1*02:01-B1*13:01L
  source 1..14: note = Severe acute respiratory syndrome coronavirus 2
TSGRWVLNNDYYRS

SEQ ID NO: 24270 - protein, 11 aa, Severe acute respiratory syndrome-related coronavirus
  REGION 1..11: note = Table B: HLA-DPA1*02:01-B1*13:01L
  source 1..11: note = Severe acute respiratory syndrome coronavirus 2
AYIICISTKHF

SEQ ID NO: 24271 - protein, 16 aa, Severe acute respiratory syndrome-related coronavirus
  REGION 1..16: note = Table B: HLA-DPA1*02:01-B1*13:01L
  source 1..16: note = Severe acute respiratory syndrome coronavirus 2
YWFFSNYLKRRVVFNG

SEQ ID NO: 24272 - protein, 16 aa, Severe acute respiratory syndrome-related coronavirus
  REGION 1..16: note = Table B: HLA-DPA1*02:01-B1*13:01L
  source 1..16: note = Severe acute respiratory syndrome coronavirus 2
FFSNYLKRRVVFNGVS

SEQ ID NO: 24273 - protein, 12 aa, Severe acute respiratory syndrome-related coronavirus
  REGION 1..12: note = Table B: HLA-DPA1*02:01-B1*13:01L HLA-DPA1*03:01-B1*105:01L HLA-DRB1*16:01L HLA-DRB1*15:03L
  source 1..12: note = Severe acute respiratory syndrome coronavirus 2
KYKYFSGAMDTT

SEQ ID NO: 24274 - protein, 13 aa, Severe acute respiratory syndrome-related coronavirus
  REGION 1..13: note = Table B: HLA-DPA1*02:01-B1*13:01L
  source 1..13: note = Severe acute respiratory syndrome coronavirus 2
SYREAACCHLAKA

SEQ ID NO: 24275 - protein, 16 aa, Severe acute respiratory syndrome-related coronavirus
  REGION 1..16: note = Table B: HLA-DPA1*02:01-B1*13:01L
  source 1..16: note = Severe acute respiratory syndrome coronavirus 2
PPQTSITSAVLQSGFR

SEQ ID NO: 24276 - protein, 13 aa, Severe acute respiratory syndrome-related coronavirus
  REGION 1..13: note = Table B: HLA-DPA1*02:01-B1*13:01L
  source 1..13: note = Severe acute respiratory syndrome coronavirus 2
GFRKMAFPSGKVE

SEQ ID NO: 24277 - protein, 13 aa, Severe acute respiratory syndrome-related coronavirus
  REGION 1..13: note = Table B: HLA-DPA1*02:01-B1*13:01L
  source 1..13: note = Severe acute respiratory syndrome coronavirus 2
FRKMAFPSGKVEG

SEQ ID NO: 24278 - protein, 16 aa, Severe acute respiratory syndrome-related coronavirus
  REGION 1..16: note = Table B: HLA-DPA1*02:01-B1*13:01L
  source 1..16: note = Severe acute respiratory syndrome coronavirus 2
NGLWLDDVVYCPRHVI

SEQ ID NO: 24279 - protein, 19 aa, Severe acute respiratory syndrome-related coronavirus
  REGION 1..19: note = Table B: HLA-DPA1*02:01-B1*13:01L
  source 1..19: note = Severe acute respiratory syndrome coronavirus 2
CPRHVICTSEDMLNPNYED

SEQ ID NO: 24280 - protein, 14 aa, Severe acute respiratory syndrome-related coronavirus
  REGION 1..14: note = Table B: HLA-DPA1*02:01-B1*13:01L HLA-DPA1*03:01-B1*105:01L
  source 1..14: note = Severe acute respiratory syndrome coronavirus 2
AGNVQLRVIGHSMQ

SEQ ID NO: 24281 - protein, 10 aa, Severe acute respiratory syndrome-related coronavirus
  REGION 1..10: note = Table B: HLA-DPA1*02:01-B1*13:01L HLA-DQA1*01:03-B1*06:01L HLA-DQA1*02:01-B1*03:03L
  source 1..10: note = Severe acute respiratory syndrome coronavirus 2
NRFTTTLNDF

SEQ ID NO: 24282 - protein, 11 aa, Severe acute respiratory syndrome-related coronavirus
  REGION 1..11: note = Table B: HLA-DPA1*02:01-B1*13:01L HLA-DRB1*15:03L
  source 1..11: note = Severe acute respiratory syndrome coronavirus 2
RFTTTLNDFNL

SEQ ID NO: 24283 - protein, 13 aa, Severe acute respiratory syndrome-related coronavirus
  REGION 1..13: note = Table B: HLA-DPA1*02:01-B1*13:01L
  source 1..13: note = Severe acute respiratory syndrome coronavirus 2
RTILGSALLEDEF

SEQ ID NO: 24284 - protein, 13 aa, Severe acute respiratory syndrome-related coronavirus
  REGION 1..13: note = Table B: HLA-DPA1*02:01-B1*13:01L HLA-DRB1*16:01L
  source 1..13: note = Severe acute respiratory syndrome coronavirus 2
ALLEDEFTPFDVV

SEQ ID NO: 24285 - protein, 15 aa, Severe acute respiratory syndrome-related coronavirus
  REGION 1..15: note = Table B: HLA-DPA1*02:01-B1*13:01L HLA-DPA1*01:03-B1*104:01L
  source 1..15: note = Severe acute respiratory syndrome coronavirus 2
FKLKDCVMYASAVVL

SEQ ID NO: 24286 - protein, 19 aa, Severe acute respiratory syndrome-related coronavirus
  REGION 1..19: note = Table B: HLA-DPA1*02:01-B1*13:01L
  source 1..19: note = Severe acute respiratory syndrome coronavirus 2
PPKNSIDAFKLNIKLLGVG

SEQ ID NO: 24287 - protein, 16 aa, Severe acute respiratory syndrome-related coronavirus
  REGION 1..16: note = Table B: HLA-DPA1*02:01-B1*13:01L
  source 1..16: note = Severe acute respiratory syndrome coronavirus 2
GKPCIKVATVQSKMSD

SEQ ID NO: 24288 - protein, 15 aa, Severe acute respiratory syndrome-related coronavirus
  REGION 1..15: note = Table B: HLA-DPA1*02:01-B1*13:01L
  source 1..15: note = Severe acute respiratory syndrome coronavirus 2
GAVDINKLCEEMLDN

SEQ ID NO: 24289 - protein, 13 aa, Severe acute respiratory syndrome-related coronavirus
  REGION 1..13: note = Table B: HLA-DPA1*02:01-B1*13:01L
  source 1..13: note = Severe acute respiratory syndrome coronavirus 2
KRAKVTSAMQTML

SEQ ID NO: 24290 - protein, 14 aa, Severe acute respiratory syndrome-related coronavirus
  REGION 1..14: note = Table B: HLA-DPA1*02:01-B1*13:01L
  source 1..14: note = Severe acute respiratory syndrome coronavirus 2
KIVQLSEISMDNSP

SEQ ID NO: 24291 - protein, 16 aa, Severe acute respiratory syndrome-related coronavirus
  REGION 1..16: note = Table B: HLA-DPA1*02:01-B1*13:01L
  source 1..16: note = Severe acute respiratory syndrome coronavirus 2
ISMDNSPNLAWPLIVT

SEQ ID NO: 24292 - protein, 14 aa, Severe acute respiratory syndrome-related coronavirus
  REGION 1..14: note = Table B: HLA-DPA1*02:01-B1*13:01L HLA-DRB1*04:08L
  source 1..14: note = Severe acute respiratory syndrome coronavirus 2
AGNATEVPANSTVL

SEQ ID NO: 24293 - protein, 16 aa, Severe acute respiratory syndrome-related coronavirus
  REGION 1..16: note = Table B: HLA-DPA1*02:01-B1*13:01L
  source 1..16: note = Severe acute respiratory syndrome coronavirus 2
GMWKGYGCSCDQLREP

SEQ ID NO: 24294 - protein, 14 aa, Severe acute respiratory syndrome-related coronavirus
  REGION 1..14: note = Table B: HLA-DPA1*02:01-B1*13:01L
  source 1..14: note = Severe acute respiratory syndrome coronavirus 2
YNDKVAGFAKFLKT

SEQ ID NO: 24295 - protein, 18 aa, Severe acute respiratory syndrome-related coronavirus
  REGION 1..18: note = Table B: HLA-DPA1*02:01-B1*13:01L
  source 1..18: note = Severe acute respiratory syndrome coronavirus 2
GFAKFLKTNCCRFQEKDE

SEQ ID NO: 24296 - protein, 14 aa, Severe acute respiratory syndrome-related coronavirus
  REGION 1..14: note = Table B: HLA-DPA1*02:01-B1*13:01L HLA-DPA1*03:01-B1*105:01L
  source 1..14: note = Severe acute respiratory syndrome coronavirus 2
FQEKDEDDNLIDSY

SEQ ID NO: 24297 - protein, 15 aa, Severe acute respiratory syndrome-related coronavirus
  REGION 1..15: note = Table B: HLA-DPA1*02:01-B1*13:01L
  source 1..15: note = Severe acute respiratory syndrome coronavirus 2
DEDDNLIDSYFVVKR

SEQ ID NO: 24298 - protein, 12 aa, Severe acute respiratory syndrome-related coronavirus
  REGION 1..12: note = Table B: HLA-DPA1*02:01-B1*13:01L HLA-DRB1*15:03L
  source 1..12: note = Severe acute respiratory syndrome coronavirus 2
FKFRIDGDMVPH

SEQ ID NO: 24299 - protein, 14 aa, Severe acute respiratory syndrome-related coronavirus
  REGION 1..14: note = Table B: HLA-DPA1*02:01-B1*13:01L
  source 1..14: note = Severe acute respiratory syndrome coronavirus 2
IDGDMVPHISRQRL

SEQ ID NO: 24300 - protein, 11 aa, Severe acute respiratory syndrome-related coronavirus
  REGION 1..11: note = Table B: HLA-DPA1*02:01-B1*13:01L HLA-DQA1*01:03-B1*06:01L
  source 1..11: note = Severe acute respiratory syndrome coronavirus 2
KYTMADLVYAL

SEQ ID NO: 24301 - protein, 13 aa, Severe acute respiratory syndrome-related coronavirus
  REGION 1..13: note = Table B: HLA-DPA1*02:01-B1*13:01L
  source 1..13: note = Severe acute respiratory syndrome coronavirus 2
ALRHFDEGNCDTL

SEQ ID NO: 24302 - protein, 15 aa, Severe acute respiratory syndrome-related coronavirus
  REGION 1..15: note = Table B: HLA-DPA1*02:01-B1*13:01L
  source 1..15: note = Severe acute respiratory syndrome coronavirus 2
LKEILVTYNCCDDDY

SEQ ID NO: 24303 - protein, 14 aa, Severe acute respiratory syndrome-related coronavirus
  REGION 1..14: note = Table B: HLA-DPA1*02:01-B1*13:01L
  source 1..14: note = Severe acute respiratory syndrome coronavirus 2
ALLKTVQFCDAMRN

SEQ ID NO: 24304 - protein, 15 aa, Severe acute respiratory syndrome-related coronavirus
  REGION 1..15: note = Table B: HLA-DPA1*02:01-B1*13:01L HLA-DRB1*15:03L
  source 1..15: note = Severe acute respiratory syndrome coronavirus 2
DNQDLNGNWYDFGDF

SEQ ID NO: 24305 - protein, 10 aa, Severe acute respiratory syndrome-related coronavirus
  REGION 1..10: note = Table B: HLA-DPA1*02:01-B1*13:01L HLA-DQA1*01:03-B1*06:01L
  source 1..10: note = Severe acute respiratory syndrome coronavirus 2
SYYSLLMPIL

SEQ ID NO: 24306 - protein, 13 aa, Severe acute respiratory syndrome-related coronavirus
  REGION 1..13: note = Table B: HLA-DPA1*02:01-B1*13:01L
  source 1..13: note = Severe acute respiratory syndrome coronavirus 2
DLTKPYIKWDLLK

SEQ ID NO: 24307 - protein, 11 aa, Severe acute respiratory syndrome-related coronavirus
  REGION 1..11: note = Table B: HLA-DPA1*02:01-B1*13:01L
  source 1..11: note = Severe acute respiratory syndrome coronavirus 2
VFPPTSFGPLV

SEQ ID NO: 24308 - protein, 14 aa, Severe acute respiratory syndrome-related coronavirus
  REGION 1..14: note = Table B: HLA-DPA1*02:01-B1*13:01L HLA-DRB1*15:03L
  source 1..14: note = Severe acute respiratory syndrome coronavirus 2
FGPLVRKIFVDGVP

SEQ ID NO: 24309 - protein, 14 aa, Severe acute respiratory syndrome-related coronavirus
  REGION 1..14: note = Table B: HLA-DPA1*02:01-B1*13:01L
  source 1..14: note = Severe acute respiratory syndrome coronavirus 2
TGYHFRELGVVHNQ

SEQ ID NO: 24310 - protein, 13 aa, Severe acute respiratory syndrome-related coronavirus
  REGION 1..13: note = Table B: HLA-DPA1*02:01-B1*13:01L
  source 1..13: note = Severe acute respiratory syndrome coronavirus 2
YAADPAMHAASGN

SEQ ID NO: 24311 - protein, 14 aa, Severe acute respiratory syndrome-related coronavirus
  REGION 1..14: note = Table B: HLA-DPA1*02:01-B1*13:01L HLA-DRB1*16:01L HLA-DRB1*15:03L
  source 1..14: note = Severe acute respiratory syndrome coronavirus 2
PGNFNKDFYDFAVS

SEQ ID NO: 24312 - protein, 14 aa, Severe acute respiratory syndrome-related coronavirus
  REGION 1..14: note = Table B: HLA-DPA1*02:01-B1*13:01L HLA-DRB1*07:01L
  source 1..14: note = Severe acute respiratory syndrome coronavirus 2
KHFFFAQDGNAAIS

SEQ ID NO: 24313 - protein, 14 aa, Severe acute respiratory syndrome-related coronavirus
  REGION 1..14: note = Table B: HLA-DPA1*02:01-B1*13:01L HLA-DRB1*15:03L
  source 1..14: note = Severe acute respiratory syndrome coronavirus 2
ISDYDYYRYNLPTM

SEQ ID NO: 24314 - protein, 16 aa, Severe acute respiratory syndrome-related coronavirus
  REGION 1..16: note = Table B: HLA-DPA1*02:01-B1*13:01L
  source 1..16: note = Severe acute respiratory syndrome coronavirus 2
IPTITQMNLKYAISAK

SEQ ID NO: 24315 - protein, 13 aa, Severe acute respiratory syndrome-related coronavirus
  REGION 1..13: note = Table B: HLA-DPA1*02:01-B1*13:01L
  source 1..13: note = Severe acute respiratory syndrome coronavirus 2
NRARTVAGVSICS

SEQ ID NO: 24316 - protein, 13 aa, Severe acute respiratory syndrome-related coronavirus
  REGION 1..13: note = Table B: HLA-DPA1*02:01-B1*13:01L
  source 1..13: note = Severe acute respiratory syndrome coronavirus 2
ATRGATVVIGTSK

SEQ ID NO: 24317 - protein, 10 aa, Severe acute respiratory syndrome-related coronavirus
  REGION 1..10: note = Table B: HLA-DPA1*02:01-B1*13:01L HLA-DQA1*01:03-B1*06:01L
  source 1..10: note = Severe acute respiratory syndrome coronavirus 2
KFYGGWHNML

SEQ ID NO: 24318 - protein, 12 aa, Severe acute respiratory syndrome-related coronavirus
  REGION 1..12: note = Table B: HLA-DPA1*02:01-B1*13:01L
  source 1..12: note = Severe acute respiratory syndrome coronavirus 2
LKTVYSDVENPH

SEQ ID NO: 24319 - protein, 15 aa, Severe acute respiratory syndrome-related coronavirus
  REGION 1..15: note = Table B: HLA-DPA1*02:01-B1*13:01L
  source 1..15: note = Severe acute respiratory syndrome coronavirus 2
LRIMASLVLARKHTT

SEQ ID NO: 24320 - protein, 12 aa, Severe acute respiratory syndrome-related coronavirus
  REGION 1..12: note = Table B: HLA-DPA1*02:01-B1*13:01L HLA-DRB1*16:01L
  source 1..12: note = Severe acute respiratory syndrome coronavirus 2
RFYRLANECAQV

SEQ ID NO: 24321 - protein, 14 aa, Severe acute respiratory syndrome-related coronavirus
  REGION 1..14: note = Table B: HLA-DPA1*02:01-B1*13:01L HLA-DPA1*01:03-B1*104:01L
  source 1..14: note = Severe acute respiratory syndrome coronavirus 2
YRLANECAQVLSEM

SEQ ID NO: 24322 - protein, 10 aa, Severe acute respiratory syndrome-related coronavirus
  REGION 1..10: note = Table B: HLA-DPA1*02:01-B1*13:01L HLA-DQA1*01:03-B1*06:01L
  source 1..10: note = Severe acute respiratory syndrome coronavirus 2
AYANSVFNIC

SEQ ID NO: 24323 - protein, 14 aa, Severe acute respiratory syndrome-related coronavirus
  REGION 1..14: note = Table B: HLA-DPA1*02:01-B1*13:01L
  source 1..14: note = Severe acute respiratory syndrome coronavirus 2
QHRLYECLYRNRDV

SEQ ID NO: 24324 - protein, 11 aa, Severe acute respiratory syndrome-related coronavirus
  REGION 1..11: note = Table B: HLA-DPA1*02:01-B1*13:01L
  source 1..11: note = Severe acute respiratory syndrome coronavirus 2
TYASQGLVASI

SEQ ID NO: 24325 - protein, 16 aa, Severe acute respiratory syndrome-related coronavirus
  REGION 1..16: note = Table B: HLA-DPA1*02:01-B1*13:01L
  source 1..16: note = Severe acute respiratory syndrome coronavirus 2
MLVKQGDDYVYLPYPD

SEQ ID NO: 24326 - protein, 13 aa, Severe acute respiratory syndrome-related coronavirus
  REGION 1..13: note = Table B: HLA-DPA1*02:01-B1*13:01L
  source 1..13: note = Severe acute respiratory syndrome coronavirus 2
AIDAYPLTKHPNQ

SEQ ID NO: 24327 - protein, 13 aa, Severe acute respiratory syndrome-related coronavirus
  REGION 1..13: note = Table B: HLA-DPA1*02:01-B1*13:01L
  source 1..13: note = Severe acute respiratory syndrome coronavirus 2
IRKLHDELTGHML

SEQ ID NO: 24328 - protein, 14 aa, Severe acute respiratory syndrome-related coronavirus
  REGION 1..14: note = Table B: HLA-DPA1*02:01-B1*13:01L
  source 1..14: note = Severe acute respiratory syndrome coronavirus 2
YDHVISTSHKLVLS

SEQ ID NO: 24329 - protein, 14 aa, Severe acute respiratory syndrome-related coronavirus
  REGION 1..14: note = Table B: HLA-DPA1*02:01-B1*13:01L HLA-DQA1*05:05-B1*03:01L HLA-DQA1*01:03-B1*06:01L
  source 1..14: note = Severe acute respiratory syndrome coronavirus 2
ATEETFKLSYGIAT

SEQ ID NO: 24330 - protein, 13 aa, Severe acute respiratory syndrome-related coronavirus
  REGION 1..13: note = Table B: HLA-DPA1*02:01-B1*13:01L
  source 1..13: note = Severe acute respiratory syndrome coronavirus 2
LSDRELHLSWEVG

SEQ ID NO: 24331 - protein, 14 aa, Severe acute respiratory syndrome-related coronavirus
  REGION 1..14: note = Table B: HLA-DPA1*02:01-B1*13:01L
  source 1..14: note = Severe acute respiratory syndrome coronavirus 2
SDRELHLSWEVGKP

SEQ ID NO: 24332 - protein, 15 aa, Severe acute respiratory syndrome-related coronavirus
  REGION 1..15: note = Table B: HLA-DPA1*02:01-B1*13:01L
  source 1..15: note = Severe acute respiratory syndrome coronavirus 2
YFVLTSHTVMPLSAP

SEQ ID NO: 24333 - protein, 16 aa, Severe acute respiratory syndrome-related coronavirus
  REGION 1..16: note = Table B: HLA-DPA1*02:01-B1*13:01L HLA-DPA1*03:01-B1*105:01L HLA-DQA1*01:03-B1*06:01L
  source 1..16: note = Severe acute respiratory syndrome coronavirus 2
VDALCEKALKYLPIDK

SEQ ID NO: 24334 - protein, 11 aa, Severe acute respiratory syndrome-related coronavirus
  REGION 1..11: note = Table B: HLA-DPA1*02:01-B1*13:01L HLA-DQA1*01:03-B1*06:01L
  source 1..11: note = Severe acute respiratory syndrome coronavirus 2
KYLPIDKCSRI

SEQ ID NO: 24335 - protein, 13 aa, Severe acute respiratory syndrome-related coronavirus
  REGION 1..13: note = Table B: HLA-DPA1*02:01-B1*13:01L
  source 1..13: note = Severe acute respiratory syndrome coronavirus 2
VDTVSALVYDNKL

SEQ ID NO: 24336 - protein, 16 aa, Severe acute respiratory syndrome-related coronavirus
  REGION 1..16: note = Table B: HLA-DPA1*02:01-B1*13:01L
  source 1..16: note = Severe acute respiratory syndrome coronavirus 2
ALVYDNKLKAHKDKSA

SEQ ID NO: 24337 - protein, 15 aa, Severe acute respiratory syndrome-related coronavirus
  REGION 1..15: note = Table B: HLA-DPA1*02:01-B1*13:01L
  source 1..15: note = Severe acute respiratory syndrome coronavirus 2
VYDNKLKAHKDKSAQ

SEQ ID NO: 24338 - protein, 13 aa, Severe acute respiratory syndrome-related coronavirus
  REGION 1..13: note = Table B: HLA-DPA1*02:01-B1*13:01L
  source 1..13: note = Severe acute respiratory syndrome coronavirus 2
ITHDVSSAINRPQ

SEQ ID NO: 24339 - protein, 13 aa, Severe acute respiratory syndrome-related coronavirus
  REGION 1..13: note = Table B: HLA-DPA1*02:01-B1*13:01L
  source 1..13: note = Severe acute respiratory syndrome coronavirus 2
FNVAITRAKVGIL

SEQ ID NO: 24340 - protein, 16 aa, Severe acute respiratory syndrome-related coronavirus
  REGION 1..16: note = Table B: HLA-DPA1*02:01-B1*13:01L
  source 1..16: note = Severe acute respiratory syndrome coronavirus 2
GILCIMSDRDLYDKLQ

SEQ ID NO: 24341 - protein, 11 aa, Severe acute respiratory syndrome-related coronavirus
  REGION 1..11: note = Table B: HLA-DPA1*02:01-B1*13:01L HLA-DQA1*01:03-B1*06:01L
  source 1..11: note = Severe acute respiratory syndrome coronavirus 2
TLQAENVTGLF

SEQ ID NO: 24342 - protein, 18 aa, Severe acute respiratory syndrome-related coronavirus
  REGION 1..18: note = Table B: HLA-DPA1*02:01-B1*13:01L
  source 1..18: note = Severe acute respiratory syndrome coronavirus 2
YRRLISMMGFKMNYQVNG

SEQ ID NO: 24343 - protein, 16 aa, Severe acute respiratory syndrome-related coronavirus
  REGION 1..16: note = Table B: HLA-DPA1*02:01-B1*13:01L HLA-DPA1*01:03-B1*104:01L
  source 1..16: note = Severe acute respiratory syndrome coronavirus 2
TGVNLVAVPTGYVDTP

SEQ ID NO: 24344 - protein, 16 aa, Severe acute respiratory syndrome-related coronavirus
  REGION 1..16: note = Table B: HLA-DPA1*02:01-B1*13:01L
  source 1..16: note = Severe acute respiratory syndrome coronavirus 2
VQMLSDTLKNLSDRVV

SEQ ID NO: 24345 - protein, 14 aa, Severe acute respiratory syndrome-related coronavirus
  REGION 1..14: note = Table B: HLA-DPA1*02:01-B1*13:01L HLA-DRB1*15:03L
  source 1..14: note = Severe acute respiratory syndrome coronavirus 2
IDVQQWGFTGNLQS

SEQ ID NO: 24346 - protein, 16 aa, Severe acute respiratory syndrome-related coronavirus
  REGION 1..16: note = Table B: HLA-DPA1*02:01-B1*13:01L
  source 1..16: note = Severe acute respiratory syndrome coronavirus 2
GNLQSNHDLYCQVHGN

SEQ ID NO: 24347 - protein, 14 aa, Severe acute respiratory syndrome-related coronavirus
  REGION 1..14: note = Table B: HLA-DPA1*02:01-B1*13:01L
  source 1..14: note = Severe acute respiratory syndrome coronavirus 2
KFYDAQPCSDKAYK

SEQ ID NO: 24348 - protein, 14 aa, Severe acute respiratory syndrome-related coronavirus
  REGION 1..14: note = Table B: HLA-DPA1*02:01-B1*13:01L
  source 1..14: note = Severe acute respiratory syndrome coronavirus 2
LFWNCNVDRYPANS

SEQ ID NO: 24349 - protein, 13 aa, Severe acute respiratory syndrome-related coronavirus
  REGION 1..13: note = Table B: HLA-DPA1*02:01-B1*13:01L
  source 1..13: note = Severe acute respiratory syndrome coronavirus 2
VCRFDTRVLSNLN

SEQ ID NO: 24350 - protein, 15 aa, Severe acute respiratory syndrome-related coronavirus
  REGION 1..15: note = Table B: HLA-DPA1*02:01-B1*13:01L
  source 1..15: note = Severe acute respiratory syndrome coronavirus 2
TRVLSNLNLPGCDGG

SEQ ID NO: 24351 - protein, 14 aa, Severe acute respiratory syndrome-related coronavirus
  REGION 1..14: note = Table B: HLA-DPA1*02:01-B1*13:01L
  source 1..14: note = Severe acute respiratory syndrome coronavirus 2
SHGKQVVSDIDYVP

SEQ ID NO: 24352 - protein, 15 aa, Severe acute respiratory syndrome-related coronavirus
  REGION 1..15: note = Table B: HLA-DPA1*02:01-B1*13:01L HLA-DQA1*05:05-B1*03:01L
  source 1..15: note = Severe acute respiratory syndrome coronavirus 2
VPLKSATCITRCNLG

SEQ ID NO: 24353 - protein, 10 aa, Severe acute respiratory syndrome-related coronavirus
  REGION 1..10: note = Table B: HLA-DPA1*02:01-B1*13:01L
  source 1..10: note = Severe acute respiratory syndrome coronavirus 2
LYLDAYNMMI

SEQ ID NO: 24354 - protein, 10 aa, Severe acute respiratory syndrome-related coronavirus
  REGION 1..10: note = Table B: HLA-DPA1*02:01-B1*13:01L HLA-DQA1*01:03-B1*06:01L
  source 1..10: note = Severe acute respiratory syndrome coronavirus 2
GFSLWVYKQF

SEQ ID NO: 24355 - protein, 11 aa, Severe acute respiratory syndrome-related coronavirus
  REGION 1..11: note = Table B: HLA-DPA1*02:01-B1*13:01L HLA-DQA1*01:03-B1*06:01L
  source 1..11: note = Severe acute respiratory syndrome coronavirus 2
QFDTYNLWNTF

SEQ ID NO: 24356 - protein, 15 aa, Severe acute respiratory syndrome-related coronavirus
  REGION 1..15: note = Table B: HLA-DPA1*02:01-B1*13:01L HLA-DQA1*01:03-B1*06:01L
  source 1..15: note = Severe acute respiratory syndrome coronavirus 2
VPEVKILNNLGVDIA

SEQ ID NO: 24357 - protein, 14 aa, Severe acute respiratory syndrome-related coronavirus
  REGION 1..14: note = Table B: HLA-DPA1*02:01-B1*13:01L
  source 1..14: note = Severe acute respiratory syndrome coronavirus 2
KILNNLGVDIAANT

SEQ ID NO: 24358 - protein, 16 aa, Severe acute respiratory syndrome-related coronavirus
  REGION 1..16: note = Table B: HLA-DPA1*02:01-B1*13:01L
  source 1..16: note = Severe acute respiratory syndrome coronavirus 2
IGVCSMTDIAKKPTET

SEQ ID NO: 24359 - protein, 16 aa, Severe acute respiratory syndrome-related coronavirus
  REGION 1..16: note = Table B: HLA-DPA1*02:01-B1*13:01L
  source 1..16: note = Severe acute respiratory syndrome coronavirus 2
DGRVDGQVDLFRNARN

SEQ ID NO: 24360 - protein, 15 aa, Severe acute respiratory syndrome-related coronavirus
  REGION 1..15: note = Table B: HLA-DPA1*02:01-B1*13:01L
  source 1..15: note = Severe acute respiratory syndrome coronavirus 2
VGPKQASLNGVTLIG

SEQ ID NO: 24361 - protein, 13 aa, Severe acute respiratory syndrome-related coronavirus
  REGION 1..13: note = Table B: HLA-DPA1*02:01-B1*13:01L
  source 1..13: note = Severe acute respiratory syndrome coronavirus 2
FKPRSQMEIDFLE

SEQ ID NO: 24362 - protein, 10 aa, Severe acute respiratory syndrome-related coronavirus
  REGION 1..10: note = Table B: HLA-DPA1*02:01-B1*13:01L HLA-DQA1*01:03-B1*06:01L
  source 1..10: note = Severe acute respiratory syndrome coronavirus 2
DFLELAMDEF

SEQ ID NO: 24363 - protein, 13 aa, Severe acute respiratory syndrome-related coronavirus
  REGION 1..13: note = Table B: HLA-DPA1*02:01-B1*13:01L
  source 1..13: note = Severe acute respiratory syndrome coronavirus 2
KRFKESPFELEDF

SEQ ID NO: 24364 - protein, 14 aa, Severe acute respiratory syndrome-related coronavirus
  REGION 1..14: note = Table B: HLA-DPA1*02:01-B1*13:01L
  source 1..14: note = Severe acute respiratory syndrome coronavirus 2
RFKESPFELEDFIP

SEQ ID NO: 24365 - protein, 14 aa, Severe acute respiratory syndrome-related coronavirus
  REGION 1..14: note = Table B: HLA-DPA1*02:01-B1*13:01L HLA-DRB1*04:08L
  source 1..14: note = Severe acute respiratory syndrome coronavirus 2
IKSQDLSVVSKVVK

SEQ ID NO: 24366 - protein, 16 aa, Severe acute respiratory syndrome-related coronavirus
  REGION 1..16: note = Table B: HLA-DPA1*02:01-B1*13:01L HLA-DRB1*15:03L
  source 1..16: note = Severe acute respiratory syndrome coronavirus 2
QPGVAMPNLYKMQRML

SEQ ID NO: 24367 - protein, 16 aa, Severe acute respiratory syndrome-related coronavirus
  REGION 1..16: note = Table B: HLA-DPA1*02:01-B1*13:01L HLA-DRB1*15:03L
  source 1..16: note = Severe acute respiratory syndrome coronavirus 2
LYKMQRMLLEKCDLQN

SEQ ID NO: 24368 - protein, 14 aa, Severe acute respiratory syndrome-related coronavirus
  REGION 1..14: note = Table B: HLA-DPA1*02:01-B1*13:01L
  source 1..14: note = Severe acute respiratory syndrome coronavirus 2
TVHTANKWDLIISD

SEQ ID NO: 24369 - protein, 14 aa, Severe acute respiratory syndrome-related coronavirus
  REGION 1..14: note = Table B: HLA-DPA1*02:01-B1*13:01L
  source 1..14: note = Severe acute respiratory syndrome coronavirus 2
VHTANKWDLIISDM

SEQ ID NO: 24370 - protein, 14 aa, Severe acute respiratory syndrome-related coronavirus
  REGION 1..14: note = Table B: HLA-DPA1*02:01-B1*13:01L
  source 1..14: note = Severe acute respiratory syndrome coronavirus 2
YDPKTKNVTKENDS

SEQ ID NO: 24371 - protein, 13 aa, Severe acute respiratory syndrome-related coronavirus
  REGION 1..13: note = Table B: HLA-DPA1*02:01-B1*13:01L
  source 1..13: note = Severe acute respiratory syndrome coronavirus 2
NVTKENDSKEGFF

SEQ ID NO: 24372 - protein, 14 aa, Severe acute respiratory syndrome-related coronavirus
  REGION 1..14: note = Table B: HLA-DPA1*02:01-B1*13:01L
  source 1..14: note = Severe acute respiratory syndrome coronavirus 2
SKEGFFTYICGFIQ

SEQ ID NO: 24373 - protein, 14 aa, Severe acute respiratory syndrome-related coronavirus
  REGION 1..14: note = Table B: HLA-DPA1*02:01-B1*13:01L
  source 1..14: note = Severe acute respiratory syndrome coronavirus 2
ALGGSVAIKITEHS

SEQ ID NO: 24374 - protein, 13 aa, Severe acute respiratory syndrome-related coronavirus
  REGION 1..13: note = Table B: HLA-DPA1*02:01-B1*13:01L
  source 1..13: note = Severe acute respiratory syndrome coronavirus 2
AIKITEHSWNADL

SEQ ID NO: 24375 - protein, 12 aa, Severe acute respiratory syndrome-related coronavirus
  REGION 1..12: note = Table B: HLA-DPA1*02:01-B1*13:01L HLA-DPA1*03:01-B1*105:01L
  source 1..12: note = Severe acute respiratory syndrome coronavirus 2
KITEHSWNADLY

SEQ ID NO: 24376 - protein, 12 aa, Severe acute respiratory syndrome-related coronavirus
  REGION 1..12: note = Table B: HLA-DPA1*02:01-B1*13:01L HLA-DQA1*05:05-B1*03:01L
  source 1..12: note = Severe acute respiratory syndrome coronavirus 2
SLKEGQINDMIL

SEQ ID NO: 24377 - protein, 14 aa, Severe acute respiratory syndrome-related coronavirus
  REGION 1..14: note = Table B: HLA-DPA1*02:01-B1*13:01L HLA-DPA1*03:01-B1*105:01L HLA-DQA1*05:05-B1*03:01L HLA-DQA1*01:03-B1*06:01L
  source 1..14: note = Severe acute respiratory syndrome coronavirus 2
IIRENNRVVISSDV

SEQ ID NO: 24378 - protein, 14 aa, Severe acute respiratory syndrome-related coronavirus
  REGION 1..14: note = Table B: HLA-DPA1*02:01-B1*13:01L
  source 1..14: note = Severe acute respiratory syndrome coronavirus 2
IRENNRVVISSDVL

SEQ ID NO: 24379 - protein, 11 aa, Severe acute respiratory syndrome-related coronavirus
  REGION 1..11: note = Table B: HLA-DPA1*02:01-B1*13:01L HLA-DQA1*01:03-B1*06:01L
  source 1..11: note = Severe acute respiratory syndrome coronavirus 2
VFKNIDGYFKI

SEQ ID NO: 24380 - protein, 16 aa, Severe acute respiratory syndrome-related coronavirus
  REGION 1..16: note = Table B: HLA-DPA1*02:01-B1*13:01L
  source 1..16: note = Severe acute respiratory syndrome coronavirus 2
DSSSGWTAGAAAYYVG

SEQ ID NO: 24381 - protein, 16 aa, Severe acute respiratory syndrome-related coronavirus
  REGION 1..16: note = Table B: HLA-DPA1*02:01-B1*13:01L HLA-DQA1*05:05-B1*03:01L HLA-DQA1*02:01-B1*03:03L
  source 1..16: note = Severe acute respiratory syndrome coronavirus 2
DPLSETKCTLKSFTVE

SEQ ID NO: 24382 - protein, 13 aa, Severe acute respiratory syndrome-related coronavirus
  REGION 1..13: note = Table B: HLA-DPA1*02:01-B1*13:01L
  source 1..13: note = Severe acute respiratory syndrome coronavirus 2
VSPTKLNDLCFTN

SEQ ID NO: 24383 - protein, 10 aa, Severe acute respiratory syndrome-related coronavirus
  REGION 1..10: note = Table B: HLA-DPA1*02:01-B1*13:01L
  source 1..10: note = Severe acute respiratory syndrome coronavirus 2
CYFPLQSYGF

SEQ ID NO: 24384 - protein, 15 aa, Severe acute respiratory syndrome-related coronavirus
  REGION 1..15: note = Table B: HLA-DPA1*02:01-B1*13:01L HLA-DPA1*03:01-B1*105:01L HLA-DRB1*16:01L
  source 1..15: note = Severe acute respiratory syndrome coronavirus 2
TNLVKNKCVNFNFNG

SEQ ID NO: 24385 - protein, 13 aa, Severe acute respiratory syndrome-related coronavirus
  REGION 1..13: note = Table B: HLA-DPA1*02:01-B1*13:01L
  source 1..13: note = Severe acute respiratory syndrome coronavirus 2
RDIADTTDAVRDP

SEQ ID NO: 24386 - protein, 13 aa, Severe acute respiratory syndrome-related coronavirus
  REGION 1..13: note = Table B: HLA-DPA1*02:01-B1*13:01L
  source 1..13: note = Severe acute respiratory syndrome coronavirus 2
DTTDAVRDPQTLE

SEQ ID NO: 24387 - protein, 12 aa, Severe acute respiratory syndrome-related coronavirus
  REGION 1..12: note = Table B: HLA-DPA1*02:01-B1*13:01L
  source 1..12: note = Severe acute respiratory syndrome coronavirus 2
NRALTGIAVEQD

SEQ ID NO: 24388 - protein, 15 aa, Severe acute respiratory syndrome-related coronavirus
  REGION 1..15: note = Table B: HLA-DPA1*02:01-B1*13:01L
  source 1..15: note = Severe acute respiratory syndrome coronavirus 2
DPSKPSKRSFIEDLL

SEQ ID NO: 24389 - protein, 15 aa, Severe acute respiratory syndrome-related coronavirus
  REGION 1..15: note = Table B: HLA-DPA1*02:01-B1*13:01L
  source 1..15: note = Severe acute respiratory syndrome coronavirus 2
GAALQIPFAMQMAYR

SEQ ID NO: 24390 - protein, 10 aa, Severe acute respiratory syndrome-related coronavirus
  REGION 1..10: note = Table B: HLA-DPA1*02:01-B1*13:01L HLA-DQA1*01:03-B1*06:01L
  source 1..10: note = Severe acute respiratory syndrome coronavirus 2
PFAMQMAYRF

SEQ ID NO: 24391 - protein, 13 aa, Severe acute respiratory syndrome-related coronavirus
  REGION 1..13: note = Table B: HLA-DPA1*02:01-B1*13:01L
  source 1..13: note = Severe acute respiratory syndrome coronavirus 2
AYRFNGIGVTQNV

SEQ ID NO: 24392 - protein, 14 aa, Severe acute respiratory syndrome-related coronavirus
  REGION 1..14: note = Table B: HLA-DPA1*02:01-B1*13:01L
  source 1..14: note = Severe acute respiratory syndrome coronavirus 2
IGVTQNVLYENQKL

SEQ ID NO: 24393 - protein, 14 aa, Severe acute respiratory syndrome-related coronavirus
  REGION 1..14: note = Table B: HLA-DPA1*02:01-B1*13:01L
  source 1..14: note = Severe acute respiratory syndrome coronavirus 2
LNDILSRLDKVEAE

SEQ ID NO: 24394 - protein, 12 aa, Severe acute respiratory syndrome-related coronavirus
  REGION 1..12: note = Table B: HLA-DPA1*02:01-B1*13:01L
  source 1..12: note = Severe acute respiratory syndrome coronavirus 2
RLDKVEAEVQID

SEQ ID NO: 24395 - protein, 13 aa, Severe acute respiratory syndrome-related coronavirus
  REGION 1..13: note = Table B: HLA-DPA1*02:01-B1*13:01L
  source 1..13: note = Severe acute respiratory syndrome coronavirus 2
YVTQQLIRAAEIR

SEQ ID NO: 24396 - protein, 14 aa, Severe acute respiratory syndrome-related coronavirus
  REGION 1..14: note = Table B: HLA-DPA1*02:01-B1*13:01L
  source 1..14: note = Severe acute respiratory syndrome coronavirus 2
IRASANLAATKMSE

SEQ ID NO: 24397 - protein, 14 aa, Severe acute respiratory syndrome-related coronavirus
  REGION 1..14: note = Table B: HLA-DPA1*02:01-B1*13:01L
  source 1..14: note = Severe acute respiratory syndrome coronavirus 2
NIQKEIDRLNEVAK

SEQ ID NO: 24398 - protein, 10 aa, Severe acute respiratory syndrome-related coronavirus
  REGION 1..10: note = Table B: HLA-DPA1*02:01-B1*13:01L HLA-DQA1*01:03-B1*06:01L
  source 1..10: note = Severe acute respiratory syndrome coronavirus 2
KWPWYIWLGF

SEQ ID NO: 24399 - protein, 18 aa, Severe acute respiratory syndrome-related coronavirus
  REGION 1..18: note = Table B: HLA-DPA1*02:01-B1*13:01L
  source 1..18: note = Severe acute respiratory syndrome coronavirus 2
TIGTVTLKQGEIKDATPS

SEQ ID NO: 24400 - protein, 18 aa, Severe acute respiratory syndrome-related coronavirus
  REGION 1..18: note = Table B: HLA-DPA1*02:01-B1*13:01L
  source 1..18: note = Severe acute respiratory syndrome coronavirus 2
IGTVTLKQGEIKDATPSD

SEQ ID NO: 24401 - protein, 14 aa, Severe acute respiratory syndrome-related coronavirus
  REGION 1..14: note = Table B: HLA-DPA1*02:01-B1*13:01L
  source 1..14: note = Severe acute respiratory syndrome coronavirus 2
ASKIITLKKRWQLA

SEQ ID NO: 24402 - protein, 14 aa, Severe acute respiratory syndrome-related coronavirus
  REGION 1..14: note = Table B: HLA-DPA1*02:01-B1*13:01L
  source 1..14: note = Severe acute respiratory syndrome coronavirus 2
FVTVYSHLLLVAAG

SEQ ID NO: 24403 - protein, 10 aa, Severe acute respiratory syndrome-related coronavirus
  REGION 1..10: note = Table B: HLA-DPA1*02:01-B1*13:01L HLA-DQA1*01:03-B1*06:01L
  source 1..10: note = Severe acute respiratory syndrome coronavirus 2
LYDANYFLCW

SEQ ID NO: 24404 - protein, 16 aa, Severe acute respiratory syndrome-related coronavirus
  REGION 1..16: note = Table B: HLA-DPA1*02:01-B1*13:01L
  source 1..16: note = Severe acute respiratory syndrome coronavirus 2
YTEKWESGVKDCVVLH

SEQ ID NO: 24405 - protein, 10 aa, Severe acute respiratory syndrome-related coronavirus
  REGION 1..10: note = Table B: HLA-DPA1*02:01-B1*13:01L HLA-DQA1*01:03-B1*06:01L HLA-DRB1*15:03L
  source 1..10: note = Severe acute respiratory syndrome coronavirus 2
RFLYIIKLIF

SEQ ID NO: 24406 - protein, 10 aa, Severe acute respiratory syndrome-related coronavirus
  REGION 1..10: note = Table B: HLA-DPA1*02:01-B1*13:01L HLA-DQA1*01:03-B1*06:01L
  source 1..10: note = Severe acute respiratory syndrome coronavirus 2
LYIIKLIFLW

SEQ ID NO: 24407 - protein, 15 aa, Severe acute respiratory syndrome-related coronavirus
  REGION 1..15: note = Table B: HLA-DPA1*02:01-B1*13:01L
  source 1..15: note = Severe acute respiratory syndrome coronavirus 2
LFARTRSMWSFNPET

SEQ ID NO: 24408 - protein, 17 aa, Severe acute respiratory syndrome-related coronavirus
  REGION 1..17: note = Table B: HLA-DPA1*02:01-B1*13:01L
  source 1..17: note = Severe acute respiratory syndrome coronavirus 2
IAGHHLGRCDIKDLPKE

SEQ ID NO: 24409 - protein, 15 aa, Severe acute respiratory syndrome-related coronavirus
  REGION 1..15: note = Table B: HLA-DPA1*02:01-B1*13:01L HLA-DRB1*04:08L
  source 1..15: note = Severe acute respiratory syndrome coronavirus 2
IKDLPKEITVATSRT

SEQ ID NO: 24410 - protein, 15 aa, Severe acute respiratory syndrome-related coronavirus
  REGION 1..15: note = Table B: HLA-DPA1*02:01-B1*13:01L
  source 1..15: note = Severe acute respiratory syndrome coronavirus 2
ATSRTLSYYKLGASQ

SEQ ID NO: 24411 - protein, 14 aa, Severe acute respiratory syndrome-related coronavirus
  REGION 1..14: note = Table B: HLA-DPA1*02:01-B1*13:01L
  source 1..14: note = Severe acute respiratory syndrome coronavirus 2
RTLSYYKLGASQRV

SEQ ID NO: 24412 - protein, 16 aa, Severe acute respiratory syndrome-related coronavirus
  REGION 1..16: note = Table B: HLA-DPA1*02:01-B1*13:01L
  source 1..16: note = Severe acute respiratory syndrome coronavirus 2
TQFAFACPDGVKHVYQ

SEQ ID NO: 24413 - protein, 16 aa, Severe acute respiratory syndrome-related coronavirus
  REGION 1..16: note = Table B: HLA-DPA1*02:01-B1*13:01L
  source 1..16: note = Severe acute respiratory syndrome coronavirus 2
YQLRARSVSPKLFIRQ

SEQ ID NO: 24414 - protein, 16 aa, Severe acute respiratory syndrome-related coronavirus
  REGION 1..16: note = Table B: HLA-DPA1*02:01-B1*13:01L
  source 1..16: note = Severe acute respiratory syndrome coronavirus 2
LRARSVSPKLFIRQEE

SEQ ID NO: 24415 - protein, 15 aa, Severe acute respiratory syndrome-related coronavirus
  REGION 1..15: note = Table B: HLA-DPA1*02:01-B1*13:01L HLA-DRB1*15:03L
  source 1..15: note = Severe acute respiratory syndrome coronavirus 2
GSLVVRCSFYEDFLE

SEQ ID NO: 24416 - protein, 14 aa, Severe acute respiratory syndrome-related coronavirus
  REGION 1..14: note = Table B: HLA-DPA1*02:01-B1*13:01L
  source 1..14: note = Severe acute respiratory syndrome coronavirus 2
VVRCSFYEDFLEYH

SEQ ID NO: 24417 - protein, 18 aa, Severe acute respiratory syndrome-related coronavirus
  REGION 1..18: note = Table B: HLA-DPA1*02:01-B1*13:01L
  source 1..18: note = Severe acute respiratory syndrome coronavirus 2
FPRGQGVPINTNSSPDDQ

SEQ ID NO: 24418 - protein, 13 aa, Severe acute respiratory syndrome-related coronavirus
  REGION 1..13: note = Table B: HLA-DPA1*02:01-B1*13:01L
  source 1..13: note = Severe acute respiratory syndrome coronavirus 2
GDGKMKDLSPRWY

SEQ ID NO: 24419 - protein, 11 aa, Severe acute respiratory syndrome-related coronavirus
  REGION 1..11: note = Table B: HLA-DPA1*02:01-B1*13:01L HLA-DQA1*01:03-B1*06:01L HLA-DQA1*02:01-B1*03:03L
  source 1..11: note = Severe acute respiratory syndrome coronavirus 2
PYGANKDGIIW

SEQ ID NO: 24420 - protein, 14 aa, Severe acute respiratory syndrome-related coronavirus
  REGION 1..14: note = Table B: HLA-DPA1*02:01-B1*13:01L HLA-DPA1*01:03-B1*104:01L HLA-DPA1*01:02-B1*04:01L
  source 1..14: note = Severe acute respiratory syndrome coronavirus 2
NKDGIIWVATEGAL

SEQ ID NO: 24421 - protein, 14 aa, Severe acute respiratory syndrome-related coronavirus
  REGION 1..14: note = Table B: HLA-DPA1*02:01-B1*13:01L HLA-DPA1*01:03-B1*104:01L
  source 1..14: note = Severe acute respiratory syndrome coronavirus 2
IWVATEGALNTPKD

SEQ ID NO: 24422 - protein, 14 aa, Severe acute respiratory syndrome-related coronavirus
  REGION 1..14: note = Table B: HLA-DPA1*02:01-B1*13:01L HLA-DRB1*07:01L
  source 1..14: note = Severe acute respiratory syndrome coronavirus 2
IVLQLPQGTTLPKG

SEQ ID NO: 24423 - protein, 19 aa, Severe acute respiratory syndrome-related coronavirus
  REGION 1..19: note = Table B: HLA-DPA1*02:01-B1*13:01L
  source 1..19: note = Severe acute respiratory syndrome coronavirus 2
PGSSRGTSPARMAGNGGDA

SEQ ID NO: 24424 - protein, 15 aa, Severe acute respiratory syndrome-related coronavirus
  REGION 1..15: note = Table B: HLA-DPA1*02:01-B1*13:01L
  source 1..15: note = Severe acute respiratory syndrome coronavirus 2
DQELIRQGTDYKHWP

SEQ ID NO: 24425 - protein, 14 aa, Severe acute respiratory syndrome-related coronavirus
  REGION 1..14: note = Table B: HLA-DPA1*02:01-B1*13:01L HLA-DPA1*03:01-B1*105:01L HLA-DQA1*01:03-B1*06:01L
  source 1..14: note = Severe acute respiratory syndrome coronavirus 2
IRQGTDYKHWPQIA

SEQ ID NO: 24426 - protein, 13 aa, Severe acute respiratory syndrome-related coronavirus
  REGION 1..13: note = Table B: HLA-DPA1*02:01-B1*13:01L HLA-DRB1*16:01L HLA-DQA1*01:03-B1*06:01L
  source 1..13: note = Severe acute respiratory syndrome coronavirus 2
DDKDPNFKDQVIL

SEQ ID NO: 24427 - protein, 16 aa, Severe acute respiratory syndrome-related coronavirus
  REGION 1..16: note = Table B: HLA-DPA1*02:01-B1*13:01L
  source 1..16: note = Severe acute respiratory syndrome coronavirus 2
KKKKADETQALPQRQK

SEQ ID NO: 24428 - protein, 11 aa, Severe acute respiratory syndrome-related coronavirus
  REGION 1..11: note = Table B: HLA-DPA1*02:01-B1*13:01L HLA-DQA1*01:03-B1*06:01L HLA-DQA1*02:01-B1*03:03L HLA-DRB1*15:03L
  source 1..11: note = Severe acute respiratory syndrome coronavirus 2
TLLPAADLDDF

SEQ ID NO: 24429 - protein, 10 aa, Severe acute respiratory syndrome-related coronavirus
  REGION 1..10: note = Table B: HLA-DPA1*02:01-B1*13:01L
  source 1..10: note = Severe acute respiratory syndrome coronavirus 2
INVFAFPFTI

SEQ ID NO: 24430 - protein, 15 aa, Severe acute respiratory syndrome-related coronavirus
  REGION 1..15: note = Table B: HLA-DPA1*03:01-B1*105:01L
  source 1..15: note = Severe acute respiratory syndrome coronavirus 2
VPGFNEKTHVQLSLP

SEQ ID NO: 24431 - protein, 13 aa, Severe acute respiratory syndrome-related coronavirus
  REGION 1..13: note = Table B: HLA-DPA1*03:01-B1*105:01L
  source 1..13: note = Severe acute respiratory syndrome coronavirus 2
VMVELVAELEGIQ

SEQ ID NO: 24432 - protein, 15 aa, Severe acute respiratory syndrome-related coronavirus
  REGION 1..15: note = Table B: HLA-DPA1*03:01-B1*105:01L
  source 1..15: note = Severe acute respiratory syndrome coronavirus 2
ENWNTKHSSGVTREL

SEQ ID NO: 24433 - protein, 15 aa, Severe acute respiratory syndrome-related coronavirus
  REGION 1..15: note = Table B: HLA-DPA1*03:01-B1*105:01L
  source 1..15: note = Severe acute respiratory syndrome coronavirus 2
TRYVDNNFCGPDGYP

SEQ ID NO: 24434 - protein, 13 aa, Severe acute respiratory syndrome-related coronavirus
  REGION 1..13: note = Table B: HLA-DPA1*03:01-B1*105:01L HLA-DQA1*05:05-B1*03:01L HLA-DQA1*02:01-B1*03:03L
  source 1..13: note = Severe acute respiratory syndrome coronavirus 2
AGKASCTLSEQLD

SEQ ID NO: 24435 - protein, 15 aa, Severe acute respiratory syndrome-related coronavirus
  REGION 1..15: note = Table B: HLA-DPA1*03:01-B1*105:01L HLA-DQA1*01:03-B1*06:01L
  source 1..15: note = Severe acute respiratory syndrome coronavirus 2
SPNECNQMCLSTLMK

SEQ ID NO: 24436 - protein, 13 aa, Severe acute respiratory syndrome-related coronavirus
  REGION 1..13: note = Table B: HLA-DPA1*03:01-B1*105:01L HLA-DQA1*05:05-B1*03:01L HLA-DQA1*02:01-B1*03:03L
  source 1..13: note = Severe acute respiratory syndrome coronavirus 2
KEGATTCGYLPQN

SEQ ID NO: 24437 - protein, 15 aa, Severe acute respiratory syndrome-related coronavirus
  REGION 1..15: note = Table B: HLA-DPA1*03:01-B1*105:01L HLA-DQA1*05:05-B1*03:01L
  source 1..15: note = Severe acute respiratory syndrome coronavirus 2
EGATTCGYLPQNAVV

SEQ ID NO: 24438 - protein, 15 aa, Severe acute respiratory syndrome-related coronavirus
  REGION 1..15: note = Table B: HLA-DPA1*03:01-B1*105:01L
  source 1..15: note = Severe acute respiratory syndrome coronavirus 2
NAVVKIYCPACHNSE

SEQ ID NO: 24439 - protein, 14 aa, Severe acute respiratory syndrome-related coronavirus
  REGION 1..14: note = Table B: HLA-DPA1*03:01-B1*105:01L
  source 1..14: note = Severe acute respiratory syndrome coronavirus 2
GRTIAFGGCVFSYV

SEQ ID NO: 24440 - protein, 13 aa, Severe acute respiratory syndrome-related coronavirus
  REGION 1..13: note = Table B: HLA-DPA1*03:01-B1*105:01L HLA-DQA1*01:03-B1*06:01L
  source 1..13: note = Severe acute respiratory syndrome coronavirus 2
SEGLNDNLLEILQ

SEQ ID NO: 24441 - protein, 12 aa, Severe acute respiratory syndrome-related coronavirus
  REGION 1..12: note = Table B: HLA-DPA1*03:01-B1*105:01L
  source 1..12: note = Severe acute respiratory syndrome coronavirus 2
GLNDNLLEILQK

SEQ ID NO: 24442 - protein, 10 aa, Severe acute respiratory syndrome-related coronavirus
  REGION 1..10: note = Table B: HLA-DPA1*03:01-B1*105:01L
  source 1..10: note = Severe acute respiratory syndrome coronavirus 2
EILQKEKVNI

SEQ ID NO: 24443 - protein, 15 aa, Severe acute respiratory syndrome-related coronavirus
  REGION 1..15: note = Table B: HLA-DPA1*03:01-B1*105:01L
  source 1..15: note = Severe acute respiratory syndrome coronavirus 2
YKAFKQIVESCGNFK

SEQ ID NO: 24444 - protein, 13 aa, Severe acute respiratory syndrome-related coronavirus
  REGION 1..13: note = Table B: HLA-DPA1*03:01-B1*105:01L HLA-DQA1*02:01-B1*03:03L
  source 1..13: note = Severe acute respiratory syndrome coronavirus 2
IVESCGNFKVTKG

SEQ ID NO: 24445 - protein, 13 aa, Severe acute respiratory syndrome-related coronavirus
  REGION 1..13: note = Table B: HLA-DPA1*03:01-B1*105:01L
  source 1..13: note = Severe acute respiratory syndrome coronavirus 2
QKAAITILDGISQ

SEQ ID NO: 24446 - protein, 13 aa, Severe acute respiratory syndrome-related coronavirus
  REGION 1..13: note = Table B: HLA-DPA1*03:01-B1*105:01L
  source 1..13: note = Severe acute respiratory syndrome coronavirus 2
TNNLVVMAYITGG

SEQ ID NO: 24447 - protein, 14 aa, Severe acute respiratory syndrome-related coronavirus
  REGION 1..14: note = Table B: HLA-DPA1*03:01-B1*105:01L HLA-DQA1*05:05-B1*03:01L HLA-DQA1*01:03-B1*06:01L
  source 1..14: note = Severe acute respiratory syndrome coronavirus 2
NNLVVMAYITGGVV

SEQ ID NO: 24448 - protein, 12 aa, Severe acute respiratory syndrome-related coronavirus
  REGION 1..12: note = Table B: HLA-DPA1*03:01-B1*105:01L
  source 1..12: note = Severe acute respiratory syndrome coronavirus 2
VQLTSQWLTNIF

SEQ ID NO: 24449 - protein, 11 aa, Severe acute respiratory syndrome-related coronavirus
  REGION 1..11: note = Table B: HLA-DPA1*03:01-B1*105:01L
  source 1..11: note = Severe acute respiratory syndrome coronavirus 2
LTSQWLTNIFG

SEQ ID NO: 24450 - protein, 13 aa, Severe acute respiratory syndrome-related coronavirus
  REGION 1..13: note = Table B: HLA-DPA1*03:01-B1*105:01L
  source 1..13: note = Severe acute respiratory syndrome coronavirus 2
WEIVKFISTCACE

SEQ ID NO: 24451 - protein, 14 aa, Severe acute respiratory syndrome-related coronavirus
  REGION 1..14: note = Table B: HLA-DPA1*03:01-B1*105:01L HLA-DQA1*05:05-B1*03:01L
  source 1..14: note = Severe acute respiratory syndrome coronavirus 2
LALCADSIIIGGAK

SEQ ID NO: 24452 - protein, 13 aa, Severe acute respiratory syndrome-related coronavirus
  REGION 1..13: note = Table B: HLA-DPA1*03:01-B1*105:01L
  source 1..13: note = Severe acute respiratory syndrome coronavirus 2
GAKLKALNLGETF

SEQ ID NO: 24453 - protein, 11 aa, Severe acute respiratory syndrome-related coronavirus
  REGION 1..11: note = Table B: HLA-DPA1*03:01-B1*105:01L HLA-DPA1*01:02-B1*04:01L HLA-DQA1*01:03-B1*06:01L
  source 1..11: note = Severe acute respiratory syndrome coronavirus 2
DTEKYCALAPN

SEQ ID NO: 24454 - protein, 14 aa, Severe acute respiratory syndrome-related coronavirus
  REGION 1..14: note = Table B: HLA-DPA1*03:01-B1*105:01L
  source 1..14: note = Severe acute respiratory syndrome coronavirus 2
MVTNNTFTLKGGAP

SEQ ID NO: 24455 - protein, 12 aa, Severe acute respiratory syndrome-related coronavirus
  REGION 1..12: note = Table B: HLA-DPA1*03:01-B1*105:01L
  source 1..12: note = Severe acute respiratory syndrome coronavirus 2
FTLKGGAPTKVT

SEQ ID NO: 24456 - protein, 14 aa, Severe acute respiratory syndrome-related coronavirus
  REGION 1..14: note = Table B: HLA-DPA1*03:01-B1*105:01L
  source 1..14: note = Severe acute respiratory syndrome coronavirus 2
VLNEKCSAYTVELG

SEQ ID NO: 24457 - protein, 11 aa, Severe acute respiratory syndrome-related coronavirus
  REGION 1..11: note = Table B: HLA-DPA1*03:01-B1*105:01L HLA-DQA1*01:03-B1*06:01L
  source 1..11: note = Severe acute respiratory syndrome coronavirus 2
TVELGTEVNEF

SEQ ID NO: 24458 - protein, 14 aa, Severe acute respiratory syndrome-related coronavirus
  REGION 1..14: note = Table B: HLA-DPA1*03:01-B1*105:01L
  source 1..14: note = Severe acute respiratory syndrome coronavirus 2
LGTEVNEFACVVAD

SEQ ID NO: 24459 - protein, 12 aa, Severe acute respiratory syndrome-related coronavirus
  REGION 1..12: note = Table B: HLA-DPA1*03:01-B1*105:01L
  source 1..12: note = Severe acute respiratory syndrome coronavirus 2
VNEFACVVADAV

SEQ ID NO: 24460 - protein, 11 aa, Severe acute respiratory syndrome-related coronavirus
  REGION 1..11: note = Table B: HLA-DPA1*03:01-B1*105:01L HLA-DRB1*15:03L
  source 1..11: note = Severe acute respiratory syndrome coronavirus 2
IDLDEWSMATY

SEQ ID NO: 24461 - protein, 14 aa, Severe acute respiratory syndrome-related coronavirus
  REGION 1..14: note = Table B: HLA-DPA1*03:01-B1*105:01L
  source 1..14: note = Severe acute respiratory syndrome coronavirus 2
EWSMATYYLFDESG

SEQ ID NO: 24462 - protein, 14 aa, Severe acute respiratory syndrome-related coronavirus
  REGION 1..14: note = Table B: HLA-DPA1*03:01-B1*105:01L
  source 1..14: note = Severe acute respiratory syndrome coronavirus 2
KLASHMYCSFYPPD

SEQ ID NO: 24463 - protein, 14 aa, Severe acute respiratory syndrome-related coronavirus
  REGION 1..14: note = Table B: HLA-DPA1*03:01-B1*105:01L
  source 1..14: note = Severe acute respiratory syndrome coronavirus 2
LASHMYCSFYPPDE

SEQ ID NO: 24464 - protein, 14 aa, Severe acute respiratory syndrome-related coronavirus
  REGION 1..14: note = Table B: HLA-DPA1*03:01-B1*105:01L
  source 1..14: note = Severe acute respiratory syndrome coronavirus 2
ASHMYCSFYPPDED

SEQ ID NO: 24465 - protein, 14 aa, Severe acute respiratory syndrome-related coronavirus
  REGION 1..14: note = Table B: HLA-DPA1*03:01-B1*105:01L HLA-DQA1*01:03-B1*06:01L
  source 1..14: note = Severe acute respiratory syndrome coronavirus 2
SHMYCSFYPPDEDE

SEQ ID NO: 24466 - protein, 15 aa, Severe acute respiratory syndrome-related coronavirus
  REGION 1..15: note = Table B: HLA-DPA1*03:01-B1*105:01L HLA-DQA1*01:03-B1*06:01L
  source 1..15: note = Severe acute respiratory syndrome coronavirus 2
EEGDCEEEEFEPSTQ

SEQ ID NO: 24467 - protein, 15 aa, Severe acute respiratory syndrome-related coronavirus
  REGION 1..15: note = Table B: HLA-DPA1*03:01-B1*105:01L
  source 1..15: note = Severe acute respiratory syndrome coronavirus 2
EGDCEEEEFEPSTQY

SEQ ID NO: 24468 - protein, 14 aa, Severe acute respiratory syndrome-related coronavirus
  REGION 1..14: note = Table B: HLA-DPA1*03:01-B1*105:01L HLA-DQA1*01:03-B1*06:01L
  source 1..14: note = Severe acute respiratory syndrome coronavirus 2
DCEEEEFEPSTQYE

SEQ ID NO: 24469 - protein, 17 aa, Severe acute respiratory syndrome-related coronavirus
  REGION 1..17: note = Table B: HLA-DPA1*03:01-B1*105:01L HLA-DRB1*15:03L
  source 1..17: note = Severe acute respiratory syndrome coronavirus 2
QPEEEQEEDWLDDDSQQ

SEQ ID NO: 24470 - protein, 15 aa, Severe acute respiratory syndrome-related coronavirus
  REGION 1..15: note = Table B: HLA-DPA1*03:01-B1*105:01L HLA-DRB1*16:01L HLA-DRB1*04:08L
  source 1..15: note = Severe acute respiratory syndrome coronavirus 2
DDSQQTVGQQDGSED

SEQ ID NO: 24471 - protein, 14 aa, Severe acute respiratory syndrome-related coronavirus
  REGION 1..14: note = Table B: HLA-DPA1*03:01-B1*105:01L HLA-DQA1*05:05-B1*03:01L
  source 1..14: note = Severe acute respiratory syndrome coronavirus 2
QTTTIQTIVEVQPQ

SEQ ID NO: 24472 - protein, 12 aa, Severe acute respiratory syndrome-related coronavirus
  REGION 1..12: note = Table B: HLA-DPA1*03:01-B1*105:01L HLA-DQA1*05:05-B1*03:01L
  source 1..12: note = Severe acute respiratory syndrome coronavirus 2
EMELTPVVQTIE

SEQ ID NO: 24473 - protein, 10 aa, Severe acute respiratory syndrome-related coronavirus
  REGION 1..10: note = Table B: HLA-DPA1*03:01-B1*105:01L HLA-DQA1*03:01-B1*03:02L HLA-DPA1*01:02-B1*04:01L HLA-DQA1*01:03-B1*06:01L HLA-DQA1*02:01-B1*03:03L
  source 1..10: note = Severe acute respiratory syndrome coronavirus 2
FSGYLKLTDN

SEQ ID NO: 24474 - protein, 16 aa, Severe acute respiratory syndrome-related coronavirus
  REGION 1..16: note = Table B: HLA-DPA1*03:01-B1*105:01L
  source 1..16: note = Severe acute respiratory syndrome coronavirus 2
DIVEEAKKVKPTVVVN

SEQ ID NO: 24475 - protein, 14 aa, Severe acute respiratory syndrome-related coronavirus
  REGION 1..14: note = Table B: HLA-DPA1*03:01-B1*105:01L
  source 1..14: note = Severe acute respiratory syndrome coronavirus 2
NKATNNAMQVESDD

SEQ ID NO: 24476 - protein, 14 aa, Severe acute respiratory syndrome-related coronavirus
  REGION 1..14: note = Table B: HLA-DPA1*03:01-B1*105:01L
  source 1..14: note = Severe acute respiratory syndrome coronavirus 2
MQVESDDYIATNGP

SEQ ID NO: 24477 - protein, 10 aa, Severe acute respiratory syndrome-related coronavirus
  REGION 1..10: note = Table B: HLA-DPA1*03:01-B1*105:01L HLA-DPA1*01:02-B1*04:01L
  source 1..10: note = Severe acute respiratory syndrome coronavirus 2
LLKSAYENFN

SEQ ID NO: 24478 - protein, 13 aa, Severe acute respiratory syndrome-related coronavirus
  REGION 1..13: note = Table B: HLA-DPA1*03:01-B1*105:01L
  source 1..13: note = Severe acute respiratory syndrome coronavirus 2
DTVRTNVYLAVFD

SEQ ID NO: 24479 - protein, 10 aa, Severe acute respiratory syndrome-related coronavirus
  REGION 1..10: note = Table B: HLA-DPA1*03:01-B1*105:01L HLA-DQA1*03:01-B1*03:02L HLA-DPA1*01:02-B1*04:01L
  source 1..10: note = Severe acute respiratory syndrome coronavirus 2
KLVSSFLEMK

SEQ ID NO: 24480 - protein, 14 aa, Severe acute respiratory syndrome-related coronavirus
  REGION 1..14: note = Table B: HLA-DPA1*03:01-B1*105:01L
  source 1..14: note = Severe acute respiratory syndrome coronavirus 2
KIKACVEEVTTTLE

SEQ ID NO: 24481 - protein, 12 aa, Severe acute respiratory syndrome-related coronavirus
  REGION 1..12: note = Table B: HLA-DPA1*03:01-B1*105:01L HLA-DRB1*15:03L
  source 1..12: note = Severe acute respiratory syndrome coronavirus 2
LLYIDINGNLHP

SEQ ID NO: 24482 - protein, 14 aa, Severe acute respiratory syndrome-related coronavirus
  REGION 1..14: note = Table B: HLA-DPA1*03:01-B1*105:01L HLA-DRB1*16:01L
  source 1..14: note = Severe acute respiratory syndrome coronavirus 2
VSDIDITFLKKDAP

SEQ ID NO: 24483 - protein, 18 aa, Severe acute respiratory syndrome-related coronavirus
  REGION 1..18: note = Table B: HLA-DPA1*03:01-B1*105:01L
  source 1..18: note = Severe acute respiratory syndrome coronavirus 2
EETRKLMPVCVETKAIVS

SEQ ID NO: 24484 - protein, 15 aa, Severe acute respiratory syndrome-related coronavirus
  REGION 1..15: note = Table B: HLA-DPA1*03:01-B1*105:01L
  source 1..15: note = Severe acute respiratory syndrome coronavirus 2
MPVCVETKAIVSTIQ

SEQ ID NO: 24485 - protein, 12 aa, Severe acute respiratory syndrome-related coronavirus
  REGION 1..12: note = Table B: HLA-DPA1*03:01-B1*105:01L
  source 1..12: note = Severe acute respiratory syndrome coronavirus 2
KYKGIKIQEGVV

SEQ ID NO: 24486 - protein, 12 aa, Severe acute respiratory syndrome-related coronavirus
  REGION 1..12: note = Table B: HLA-DPA1*03:01-B1*105:01L
  source 1..12: note = Severe acute respiratory syndrome coronavirus 2
TLVTMPLGYVTH

SEQ ID NO: 24487 - protein, 13 aa, Severe acute respiratory syndrome-related coronavirus
  REGION 1..13: note = Table B: HLA-DPA1*03:01-B1*105:01L
  source 1..13: note = Severe acute respiratory syndrome coronavirus 2
TFDNLKTLLSLRE

SEQ ID NO: 24488 - protein, 16 aa, Severe acute respiratory syndrome-related coronavirus
  REGION 1..16: note = Table B: HLA-DPA1*03:01-B1*105:01L
  source 1..16: note = Severe acute respiratory syndrome coronavirus 2
LLSLREVRTIKVFTTV

SEQ ID NO: 24489 - protein, 11 aa, Severe acute respiratory syndrome-related coronavirus
  REGION 1..11: note = Table B: HLA-DPA1*03:01-B1*105:01L HLA-DRB1*15:03L
  source 1..11: note = Severe acute respiratory syndrome coronavirus 2
TVDNINLHTQV

SEQ ID NO: 24490 - protein, 14 aa, Severe acute respiratory syndrome-related coronavirus
  REGION 1..14: note = Table B: HLA-DPA1*03:01-B1*105:01L HLA-DQA1*05:05-B1*03:01L HLA-DQA1*01:03-B1*06:01L
  source 1..14: note = Severe acute respiratory syndrome coronavirus 2
IKWADNNCYLATAL

SEQ ID NO: 24491 - protein, 11 aa, Severe acute respiratory syndrome-related coronavirus
  REGION 1..11: note = Table B: HLA-DPA1*03:01-B1*105:01L
  source 1..11: note = Severe acute respiratory syndrome coronavirus 2
VGELGDVRETM

SEQ ID NO: 24492 - protein, 10 aa, Severe acute respiratory syndrome-related coronavirus
  REGION 1..10: note = Table B: HLA-DPA1*03:01-B1*105:01L HLA-DPA1*01:02-B1*04:01L HLA-DQA1*01:03-B1*06:01L
  source 1..10: note = Severe acute respiratory syndrome coronavirus 2
FQHANLDSCK

SEQ ID NO: 24493 - protein, 10 aa, Severe acute respiratory syndrome-related coronavirus
  REGION 1..10: note = Table B: HLA-DPA1*03:01-B1*105:01L HLA-DPA1*01:02-B1*04:01L HLA-DQA1*01:03-B1*06:01L HLA-DQA1*02:01-B1*03:03L
  source 1..10: note = Severe acute respiratory syndrome coronavirus 2
MGTLSYEQFK

SEQ ID NO: 24494 - protein, 15 aa, Severe acute respiratory syndrome-related coronavirus
  REGION 1..15: note = Table B: HLA-DPA1*03:01-B1*105:01L
  source 1..15: note = Severe acute respiratory syndrome coronavirus 2
ELKHGTFTCASEYTG

SEQ ID NO: 24495 - protein, 13 aa, Severe acute respiratory syndrome-related coronavirus
  REGION 1..13: note = Table B: HLA-DPA1*03:01-B1*105:01L HLA-DQA1*05:05-B1*03:01L
  source 1..13: note = Severe acute respiratory syndrome coronavirus 2
TFTCASEYTGNYQ

SEQ ID NO: 24496 - protein, 12 aa, Severe acute respiratory syndrome-related coronavirus
  REGION 1..12: note = Table B: HLA-DPA1*03:01-B1*105:01L
  source 1..12: note = Severe acute respiratory syndrome coronavirus 2
ASFDNFKFVCDN

SEQ ID NO: 24497 - protein, 17 aa, Severe acute respiratory syndrome-related coronavirus
  REGION 1..17: note = Table B: HLA-DPA1*03:01-B1*105:01L
  source 1..17: note = Severe acute respiratory syndrome coronavirus 2
KPNTWCIRCLWSTKPVE

SEQ ID NO: 24498 - protein, 15 aa, Severe acute respiratory syndrome-related coronavirus
  REGION 1..15: note = Table B: HLA-DPA1*03:01-B1*105:01L HLA-DQA1*03:01-B1*03:02L HLA-DQA1*05:05-B1*03:01L HLA-DQA1*01:03-B1*06:01L HLA-DQA1*02:01-B1*03:03L
  source 1..15: note = Severe acute respiratory syndrome coronavirus 2
DAQGMDNLACEDLKP

SEQ ID NO: 24499 - protein, 10 aa, Severe acute respiratory syndrome-related coronavirus
  REGION 1..10: note = Table B: HLA-DPA1*03:01-B1*105:01L HLA-DPA1*01:02-B1*04:01L HLA-DQA1*01:03-B1*06:01L
  source 1..10: note = Severe acute respiratory syndrome coronavirus 2
LACEDLKPVS

SEQ ID NO: 24500 - protein, 12 aa, Severe acute respiratory syndrome-related coronavirus
  REGION 1..12: note = Table B: HLA-DPA1*03:01-B1*105:01L
  source 1..12: note = Severe acute respiratory syndrome coronavirus 2
GHTDLMAAYVDN

SEQ ID NO: 24501 - protein, 12 aa, Severe acute respiratory syndrome-related coronavirus
  REGION 1..12: note = Table B: HLA-DPA1*03:01-B1*105:01L
  source 1..12: note = Severe acute respiratory syndrome coronavirus 2
LLQLCTFTRSTN

SEQ ID NO: 24502 - protein, 13 aa, Severe acute respiratory syndrome-related coronavirus
  REGION 1..13: note = Table B: HLA-DPA1*03:01-B1*105:01L HLA-DQA1*01:03-B1*06:01L
  source 1..13: note = Severe acute respiratory syndrome coronavirus 2
MPSYCTGYREGYL

SEQ ID NO: 24503 - protein, 11 aa, Severe acute respiratory syndrome-related coronavirus
  REGION 1..11: note = Table B: HLA-DPA1*03:01-B1*105:01L HLA-DQA1*03:01-B1*03:02L HLA-DPA1*01:02-B1*04:01L HLA-DQA1*01:03-B1*06:01L HLA-DQA1*02:01-B1*03:03L
  source 1..11: note = Severe acute respiratory syndrome coronavirus 2
GYREGYLNSTN

SEQ ID NO: 24504 - protein, 14 aa, Severe acute respiratory syndrome-related coronavirus
  REGION 1..14: note = Table B: HLA-DPA1*03:01-B1*105:01L
  source 1..14: note = Severe acute respiratory syndrome coronavirus 2
TYPSLETIQITISS

SEQ ID NO: 24505 - protein, 13 aa, Severe acute respiratory syndrome-related coronavirus
  REGION 1..13: note = Table B: HLA-DPA1*03:01-B1*105:01L
  source 1..13: note = Severe acute respiratory syndrome coronavirus 2
RFFYVLGLAAIMQ

SEQ ID NO: 24506 - protein, 10 aa, Severe acute respiratory syndrome-related coronavirus
  REGION 1..10: note = Table B: HLA-DPA1*03:01-B1*105:01L HLA-DPA1*01:02-B1*04:01L
  source 1..10: note = Severe acute respiratory syndrome coronavirus 2
FFASFYYVWK

SEQ ID NO: 24507 - protein, 10 aa, Severe acute respiratory syndrome-related coronavirus
  REGION 1..10: note = Table B: HLA-DPA1*03:01-B1*105:01L HLA-DQA1*03:01-B1*03:02L HLA-DQA1*05:05-B1*03:01L HLA-DQA1*01:03-B1*06:01L HLA-DQA1*02:01-B1*03:03L
  source 1..10: note = Severe acute respiratory syndrome coronavirus 2
VLSTFISAAR

SEQ ID NO: 24508 - protein, 14 aa, Severe acute respiratory syndrome-related coronavirus
  REGION 1..14: note = Table B: HLA-DPA1*03:01-B1*105:01L
  source 1..14: note = Severe acute respiratory syndrome coronavirus 2
DVETKDVVECLKLS

SEQ ID NO: 24509 - protein, 12 aa, Severe acute respiratory syndrome-related coronavirus
  REGION 1..12: note = Table B: HLA-DPA1*03:01-B1*105:01L
  source 1..12: note = Severe acute respiratory syndrome coronavirus 2
MLTYNKVENMTP

SEQ ID NO: 24510 - protein, 12 aa, Severe acute respiratory syndrome-related coronavirus
  REGION 1..12: note = Table B: HLA-DPA1*03:01-B1*105:01L HLA-DQA1*05:05-B1*03:01L
  source 1..12: note = Severe acute respiratory syndrome coronavirus 2
VLAAECTIFKDA

SEQ ID NO: 24511 - protein, 12 aa, Severe acute respiratory syndrome-related coronavirus
  REGION 1..12: note = Table B: HLA-DPA1*03:01-B1*105:01L HLA-DQA1*03:01-B1*03:02L HLA-DQA1*05:05-B1*03:01L HLA-DQA1*02:01-B1*03:03L
  source 1..12: note = Severe acute respiratory syndrome coronavirus 2
AAECTIFKDASG

SEQ ID NO: 24512 - protein, 11 aa, Severe acute respiratory syndrome-related coronavirus
  REGION 1..11: note = Table B: HLA-DPA1*03:01-B1*105:01L HLA-DQA1*05:05-B1*03:01L HLA-DQA1*01:03-B1*06:01L
  source 1..11: note = Severe acute respiratory syndrome coronavirus 2
FKDASGKPVPY

SEQ ID NO: 24513 - protein, 14 aa, Severe acute respiratory syndrome-related coronavirus
  REGION 1..14: note = Table B: HLA-DPA1*03:01-B1*105:01L HLA-DQA1*05:05-B1*03:01L
  source 1..14: note = Severe acute respiratory syndrome coronavirus 2
PYCYDTNVLEGSVA

SEQ ID NO: 24514 - protein, 12 aa, Severe acute respiratory syndrome-related coronavirus
  REGION 1..12: note = Table B: HLA-DPA1*03:01-B1*105:01L HLA-DRB1*04:08L
  source 1..12: note = Severe acute respiratory syndrome coronavirus 2
VLEGSVAYESLR

SEQ ID NO: 24515 - protein, 12 aa, Severe acute respiratory syndrome-related coronavirus
  REGION 1..12: note = Table B: HLA-DPA1*03:01-B1*105:01L
  source 1..12: note = Severe acute respiratory syndrome coronavirus 2
LEGSVAYESLRP

SEQ ID NO: 24516 - protein, 12 aa, Severe acute respiratory syndrome-related coronavirus
  REGION 1..12: note = Table B: HLA-DPA1*03:01-B1*105:01L HLA-DQA1*05:05-B1*03:01L
  source 1..12: note = Severe acute respiratory syndrome coronavirus 2
STSGRWVLNNDY

SEQ ID NO: 24517 - protein, 15 aa, Severe acute respiratory syndrome-related coronavirus
  REGION 1..15: note = Table B: HLA-DPA1*03:01-B1*105:01L
  source 1..15: note = Severe acute respiratory syndrome coronavirus 2
PGVFCGVDAVNLLTN

SEQ ID NO: 24518 - protein, 15 aa, Severe acute respiratory syndrome-related coronavirus
  REGION 1..15: note = Table B: HLA-DPA1*03:01-B1*105:01L
  source 1..15: note = Severe acute respiratory syndrome coronavirus 2
LAYYFMRFRRAFGEY

SEQ ID NO: 24519 - protein, 16 aa, Severe acute respiratory syndrome-related coronavirus
  REGION 1..16: note = Table B: HLA-DPA1*03:01-B1*105:01L
  source 1..16: note = Severe acute respiratory syndrome coronavirus 2
FMRFRRAFGEYSHVVA

SEQ ID NO: 24520 - protein, 12 aa, Severe acute respiratory syndrome-related coronavirus
  REGION 1..12: note = Table B: HLA-DPA1*03:01-B1*105:01L
  source 1..12: note = Severe acute respiratory syndrome coronavirus 2
AFGEYSHVVAFN

SEQ ID NO: 24521 - protein, 12 aa, Severe acute respiratory syndrome-related coronavirus
  REGION 1..12: note = Table B: HLA-DPA1*03:01-B1*105:01L
  source 1..12: note = Severe acute respiratory syndrome coronavirus 2
MSFTVLCLTPVY

SEQ ID NO: 24522 - protein, 15 aa, Severe acute respiratory syndrome-related coronavirus
  REGION 1..15: note = Table B: HLA-DPA1*03:01-B1*105:01L
  source 1..15: note = Severe acute respiratory syndrome coronavirus 2
VIYLYLTFYLTNDVS

SEQ ID NO: 24523 - protein, 10 aa, Severe acute respiratory syndrome-related coronavirus
  REGION 1..10: note = Table B: HLA-DPA1*03:01-B1*105:01L HLA-DPA1*01:02-B1*04:01L
  source 1..10: note = Severe acute respiratory syndrome coronavirus 2
FNGVSFSTFE

SEQ ID NO: 24524 - protein, 13 aa, Severe acute respiratory syndrome-related coronavirus
  REGION 1..13: note = Table B: HLA-DPA1*03:01-B1*105:01L
  source 1..13: note = Severe acute respiratory syndrome coronavirus 2
FEEAALCTFLLNK

SEQ ID NO: 24525 - protein, 11 aa, Severe acute respiratory syndrome-related coronavirus
  REGION 1..11: note = Table B: HLA-DPA1*03:01-B1*105:01L
  source 1..11: note = Severe acute respiratory syndrome coronavirus 2
TFLLNKEMYLK

SEQ ID NO: 24526 - protein, 11 aa, Severe acute respiratory syndrome-related coronavirus
  REGION 1..11: note = Table B: HLA-DPA1*03:01-B1*105:01L
  source 1..11: note = Severe acute respiratory syndrome coronavirus 2
FLLNKEMYLKL

SEQ ID NO: 24527 - protein, 10 aa, Severe acute respiratory syndrome-related coronavirus
  REGION 1..10: note = Table B: HLA-DPA1*03:01-B1*105:01L HLA-DPA1*01:02-B1*04:01L HLA-DRB1*16:01L
  source 1..10: note = Severe acute respiratory syndrome coronavirus 2
LNKEMYLKLR

SEQ ID NO: 24528 - protein, 10 aa, Severe acute respiratory syndrome-related coronavirus
  REGION 1..10: note = Table B: HLA-DPA1*03:01-B1*105:01L HLA-DPA1*01:02-B1*04:01L
  source 1..10: note = Severe acute respiratory syndrome coronavirus 2
LRSDVLLPLT

SEQ ID NO: 24529 - protein, 12 aa, Severe acute respiratory syndrome-related coronavirus
  REGION 1..12: note = Table B: HLA-DPA1*03:01-B1*105:01L HLA-DQA1*03:01-B1*03:02L HLA-DQA1*01:03-B1*06:01L
  source 1..12: note = Severe acute respiratory syndrome coronavirus 2
RSDVLLPLTQYN

SEQ ID NO: 24530 - protein, 14 aa, Severe acute respiratory syndrome-related coronavirus
  REGION 1..14: note = Table B: HLA-DPA1*03:01-B1*105:01L
  source 1..14: note = Severe acute respiratory syndrome coronavirus 2
SYREAACCHLAKAL

SEQ ID NO: 24531 - protein, 14 aa, Severe acute respiratory syndrome-related coronavirus
  REGION 1..14: note = Table B: HLA-DPA1*03:01-B1*105:01L HLA-DQA1*05:05-B1*03:01L HLA-DQA1*02:01-B1*03:03L
  source 1..14: note = Severe acute respiratory syndrome coronavirus 2
YREAACCHLAKALN

SEQ ID NO: 24532 - protein, 14 aa, Severe acute respiratory syndrome-related coronavirus
  REGION 1..14: note = Table B: HLA-DPA1*03:01-B1*105:01L
  source 1..14: note = Severe acute respiratory syndrome coronavirus 2
FPSGKVEGCMVQVT

SEQ ID NO: 24533 - protein, 15 aa, Severe acute respiratory syndrome-related coronavirus
  REGION 1..15: note = Table B: HLA-DPA1*03:01-B1*105:01L
  source 1..15: note = Severe acute respiratory syndrome coronavirus 2
GKVEGCMVQVTCGTT

SEQ ID NO: 24534 - protein, 13 aa, Severe acute respiratory syndrome-related coronavirus
  REGION 1..13: note = Table B: HLA-DPA1*03:01-B1*105:01L HLA-DRB1*15:03L
  source 1..13: note = Severe acute respiratory syndrome coronavirus 2
TTLNGLWLDDVVY

SEQ ID NO: 24535 - protein, 11 aa, Severe acute respiratory syndrome-related coronavirus
  REGION 1..11: note = Table B: HLA-DPA1*03:01-B1*105:01L HLA-DPA1*01:02-B1*04:01L
  source 1..11: note = Severe acute respiratory syndrome coronavirus 2
LWLDDVVYCPR

SEQ ID NO: 24536 - protein, 15 aa, Severe acute respiratory syndrome-related coronavirus
  REGION 1..15: note = Table B: HLA-DPA1*03:01-B1*105:01L
  source 1..15: note = Severe acute respiratory syndrome coronavirus 2
HVICTSEDMLNPNYE

SEQ ID NO: 24537 - protein, 13 aa, Severe acute respiratory syndrome-related coronavirus
  REGION 1..13: note = Table B: HLA-DPA1*03:01-B1*105:01L
  source 1..13: note = Severe acute respiratory syndrome coronavirus 2
LNPNYEDLLIRKS

SEQ ID NO: 24538 - protein, 15 aa, Severe acute respiratory syndrome-related coronavirus
  REGION 1..15: note = Table B: HLA-DPA1*03:01-B1*105:01L
  source 1..15: note = Severe acute respiratory syndrome coronavirus 2
IQPGQTFSVLACYNG

SEQ ID NO: 24539 - protein, 13 aa, Severe acute respiratory syndrome-related coronavirus
  REGION 1..13: note = Table B: HLA-DPA1*03:01-B1*105:01L
  source 1..13: note = Severe acute respiratory syndrome coronavirus 2
LACYNGSPSGVYQ

SEQ ID NO: 24540 - protein, 11 aa, Severe acute respiratory syndrome-related coronavirus
  REGION 1..11: note = Table B: HLA-DPA1*03:01-B1*105:01L HLA-DPA1*01:02-B1*04:01L
  source 1..11: note = Severe acute respiratory syndrome coronavirus 2
DYDCVSFCYMH

SEQ ID NO: 24541 - protein, 13 aa, Severe acute respiratory syndrome-related coronavirus
  REGION 1..13: note = Table B: HLA-DPA1*03:01-B1*105:01L
  source 1..13: note = Severe acute respiratory syndrome coronavirus 2
YDCVSFCYMHHME

SEQ ID NO: 24542 - protein, 13 aa, Severe acute respiratory syndrome-related coronavirus
  REGION 1..13: note = Table B: HLA-DPA1*03:01-B1*105:01L HLA-DQA1*01:03-B1*06:01L
  source 1..13: note = Severe acute respiratory syndrome coronavirus 2
AGTDLEGNFYGPF

SEQ ID NO: 24543 - protein, 14 aa, Severe acute respiratory syndrome-related coronavirus
  REGION 1..14: note = Table B: HLA-DPA1*03:01-B1*105:01L
  source 1..14: note = Severe acute respiratory syndrome coronavirus 2
RQTAQAAGTDTTIT

SEQ ID NO: 24544 - protein, 12 aa, Severe acute respiratory syndrome-related coronavirus
  REGION 1..12: note = Table B: HLA-DPA1*03:01-B1*105:01L
  source 1..12: note = Severe acute respiratory syndrome coronavirus 2
DFNLVAMKYNYE

SEQ ID NO: 24545 - protein, 14 aa, Severe acute respiratory syndrome-related coronavirus
  REGION 1..14: note = Table B: HLA-DPA1*03:01-B1*105:01L
  source 1..14: note = Severe acute respiratory syndrome coronavirus 2
DILGPLSAQTGIAV

SEQ ID NO: 24546 - protein, 12 aa, Severe acute respiratory syndrome-related coronavirus
  REGION 1..12: note = Table B: HLA-DPA1*03:01-B1*105:01L HLA-DQA1*01:03-B1*06:01L
  source 1..12: note = Severe acute respiratory syndrome coronavirus 2
GIAVLDMCASLK

SEQ ID NO: 24547 - protein, 12 aa, Severe acute respiratory syndrome-related coronavirus
  REGION 1..12: note = Table B: HLA-DPA1*03:01-B1*105:01L
  source 1..12: note = Severe acute respiratory syndrome coronavirus 2
GRTILGSALLED

SEQ ID NO: 24548 - protein, 11 aa, Severe acute respiratory syndrome-related coronavirus
  REGION 1..11: note = Table B: HLA-DPA1*03:01-B1*105:01L
  source 1..11: note = Severe acute respiratory syndrome coronavirus 2
TILGSALLEDE

SEQ ID NO: 24549 - protein, 14 aa, Severe acute respiratory syndrome-related coronavirus
  REGION 1..14: note = Table B: HLA-DPA1*03:01-B1*105:01L
  source 1..14: note = Severe acute respiratory syndrome coronavirus 2
VVRQCSGVTFQSAV

SEQ ID NO: 24550 - protein, 14 aa, Severe acute respiratory syndrome-related coronavirus
  REGION 1..14: note = Table B: HLA-DPA1*03:01-B1*105:01L
  source 1..14: note = Severe acute respiratory syndrome coronavirus 2
VRQCSGVTFQSAVK

SEQ ID NO: 24551 - protein, 13 aa, Severe acute respiratory syndrome-related coronavirus
  REGION 1..13: note = Table B: HLA-DPA1*03:01-B1*105:01L
  source 1..13: note = Severe acute respiratory syndrome coronavirus 2
GTHHWLLLTILTS

SEQ ID NO: 24552 - protein, 12 aa, Severe acute respiratory syndrome-related coronavirus
  REGION 1..12: note = Table B: HLA-DPA1*03:01-B1*105:01L
  source 1..12: note = Severe acute respiratory syndrome coronavirus 2
ILTSLLVLVQST

SEQ ID NO: 24553 - protein, 13 aa, Severe acute respiratory syndrome-related coronavirus
  REGION 1..13: note = Table B: HLA-DPA1*03:01-B1*105:01L
  source 1..13: note = Severe acute respiratory syndrome coronavirus 2
HAFLCLFLLPSLA

SEQ ID NO: 24554 - protein, 12 aa, Severe acute respiratory syndrome-related coronavirus
  REGION 1..12: note = Table B: HLA-DPA1*03:01-B1*105:01L
  source 1..12: note = Severe acute respiratory syndrome coronavirus 2
YFNMVYMPASWV

SEQ ID NO: 24555 - protein, 12 aa, Severe acute respiratory syndrome-related coronavirus
  REGION 1..12: note = Table B: HLA-DPA1*03:01-B1*105:01L HLA-DRB1*15:03L
  source 1..12: note = Severe acute respiratory syndrome coronavirus 2
MRIMTWLDMVDT

SEQ ID NO: 24556 - protein, 14 aa, Severe acute respiratory syndrome-related coronavirus
  REGION 1..14: note = Table B: HLA-DPA1*03:01-B1*105:01L
  source 1..14: note = Severe acute respiratory syndrome coronavirus 2
DTSLSGFKLKDCVM

SEQ ID NO: 24557 - protein, 12 aa, Severe acute respiratory syndrome-related coronavirus
  REGION 1..12: note = Table B: HLA-DPA1*03:01-B1*105:01L
  source 1..12: note = Severe acute respiratory syndrome coronavirus 2
FKLKDCVMYASA

SEQ ID NO: 24558 - protein, 14 aa, Severe acute respiratory syndrome-related coronavirus
  REGION 1..14: note = Table B: HLA-DPA1*03:01-B1*105:01L
  source 1..14: note = Severe acute respiratory syndrome coronavirus 2
KLKDCVMYASAVVL

SEQ ID NO: 24559 - protein, 10 aa, Severe acute respiratory syndrome-related coronavirus
  REGION 1..10: note = Table B: HLA-DPA1*03:01-B1*105:01L HLA-DQA1*03:01-B1*03:02L HLA-DPA1*01:02-B1*04:01L HLA-DQA1*02:01-B1*03:03L
  source 1..10: note = Severe acute respiratory syndrome coronavirus 2
LMNVLTLVYK

SEQ ID NO: 24560 - protein, 13 aa, Severe acute respiratory syndrome-related coronavirus
  REGION 1..13: note = Table B: HLA-DPA1*03:01-B1*105:01L
  source 1..13: note = Severe acute respiratory syndrome coronavirus 2
RGIVFMCVEYCPI

SEQ ID NO: 24561 - protein, 10 aa, Severe acute respiratory syndrome-related coronavirus
  REGION 1..10: note = Table B: HLA-DPA1*03:01-B1*105:01L HLA-DPA1*01:02-B1*04:01L
  source 1..10: note = Severe acute respiratory syndrome coronavirus 2
YFGLFCLLNR

SEQ ID NO: 24562 - protein, 13 aa, Severe acute respiratory syndrome-related coronavirus
  REGION 1..13: note = Table B: HLA-DPA1*03:01-B1*105:01L
  source 1..13: note = Severe acute respiratory syndrome coronavirus 2
RLTLGVYDYLVST

SEQ ID NO: 24563 - protein, 15 aa, Severe acute respiratory syndrome-related coronavirus
  REGION 1..15: note = Table B: HLA-DPA1*03:01-B1*105:01L
  source 1..15: note = Severe acute respiratory syndrome coronavirus 2
SDVKCTSVVLLSVLQ

SEQ ID NO: 24564 - protein, 15 aa, Severe acute respiratory syndrome-related coronavirus
  REGION 1..15: note = Table B: HLA-DPA1*03:01-B1*105:01L
  source 1..15: note = Severe acute respiratory syndrome coronavirus 2
DVKCTSVVLLSVLQQ

SEQ ID NO: 24565 - protein, 12 aa, Severe acute respiratory syndrome-related coronavirus
  REGION 1..12: note = Table B: HLA-DPA1*03:01-B1*105:01L
  source 1..12: note = Severe acute respiratory syndrome coronavirus 2
LQAIASEFSSLP

SEQ ID NO: 24566 - protein, 12 aa, Severe acute respiratory syndrome-related coronavirus
  REGION 1..12: note = Table B: HLA-DPA1*03:01-B1*105:01L HLA-DQA1*01:03-B1*06:01L
  source 1..12: note = Severe acute respiratory syndrome coronavirus 2
IASEFSSLPSYA

SEQ ID NO: 24567 - protein, 13 aa, Severe acute respiratory syndrome-related coronavirus
  REGION 1..13: note = Table B: HLA-DPA1*03:01-B1*105:01L
  source 1..13: note = Severe acute respiratory syndrome coronavirus 2
FATAQEAYEQAVA

SEQ ID NO: 24568 - protein, 16 aa, Severe acute respiratory syndrome-related coronavirus
  REGION 1..16: note = Table B: HLA-DPA1*03:01-B1*105:01L HLA-DPA1*01:03-B1*104:01L
  source 1..16: note = Severe acute respiratory syndrome coronavirus 2
VVLKKLKKSLNVAKSE

SEQ ID NO: 24569 - protein, 16 aa, Severe acute respiratory syndrome-related coronavirus
  REGION 1..16: note = Table B: HLA-DPA1*03:01-B1*105:01L
  source 1..16: note = Severe acute respiratory syndrome coronavirus 2
LKKLKKSLNVAKSEFD

SEQ ID NO: 24570 - protein, 17 aa, Severe acute respiratory syndrome-related coronavirus
  REGION 1..17: note = Table B: HLA-DPA1*03:01-B1*105:01L HLA-DRB1*08:03L
  source 1..17: note = Severe acute respiratory syndrome coronavirus 2
DRDAAMQRKLEKMADQA

SEQ ID NO: 24571 - protein, 14 aa, Severe acute respiratory syndrome-related coronavirus
  REGION 1..14: note = Table B: HLA-DPA1*03:01-B1*105:01L HLA-DRB1*15:03L
  source 1..14: note = Severe acute respiratory syndrome coronavirus 2
ADQAMTQMYKQARS

SEQ ID NO: 24572 - protein, 10 aa, Severe acute respiratory syndrome-related coronavirus
  REGION 1..10: note = Table B: HLA-DPA1*03:01-B1*105:01L HLA-DPA1*01:02-B1*04:01L HLA-DQA1*01:03-B1*06:01L
  source 1..10: note = Severe acute respiratory syndrome coronavirus 2
MQTMLFTMLR

SEQ ID NO: 24573 - protein, 16 aa, Severe acute respiratory syndrome-related coronavirus
  REGION 1..16: note = Table B: HLA-DPA1*03:01-B1*105:01L HLA-DQA1*05:05-B1*03:01L
  source 1..16: note = Severe acute respiratory syndrome coronavirus 2
INNARDGCVPLNIIPL

SEQ ID NO: 24574 - protein, 15 aa, Severe acute respiratory syndrome-related coronavirus
  REGION 1..15: note = Table B: HLA-DPA1*03:01-B1*105:01L
  source 1..15: note = Severe acute respiratory syndrome coronavirus 2
NARDGCVPLNIIPLT

SEQ ID NO: 24575 - protein, 12 aa, Severe acute respiratory syndrome-related coronavirus
  REGION 1..12: note = Table B: HLA-DPA1*03:01-B1*105:01L HLA-DRB1*15:03L
  source 1..12: note = Severe acute respiratory syndrome coronavirus 2
ISMDNSPNLAWP

SEQ ID NO: 24576 - protein, 15 aa, Severe acute respiratory syndrome-related coronavirus
  REGION 1..15: note = Table B: HLA-DPA1*03:01-B1*105:01L
  source 1..15: note = Severe acute respiratory syndrome coronavirus 2
PVALRQMSCAAGTTQ

SEQ ID NO: 24577 - protein, 10 aa, Severe acute respiratory syndrome-related coronavirus
  REGION 1..10: note = Table B: HLA-DPA1*03:01-B1*105:01L
  source 1..10: note = Severe acute respiratory syndrome coronavirus 2
YFIKGLNNLN

SEQ ID NO: 24578 - protein, 13 aa, Severe acute respiratory syndrome-related coronavirus
  REGION 1..13: note = Table B: HLA-DPA1*03:01-B1*105:01L
  source 1..13: note = Severe acute respiratory syndrome coronavirus 2
TVLSFCAFAVDAA

SEQ ID NO: 24579 - protein, 12 aa, Severe acute respiratory syndrome-related coronavirus
  REGION 1..12: note = Table B: HLA-DPA1*03:01-B1*105:01L
  source 1..12: note = Severe acute respiratory syndrome coronavirus 2
VCTVCGMWKGYG

SEQ ID NO: 24580 - protein, 10 aa, Severe acute respiratory syndrome-related coronavirus
  REGION 1..10: note = Table B: HLA-DPA1*03:01-B1*105:01L HLA-DPA1*01:02-B1*04:01L HLA-DQA1*01:03-B1*06:01L HLA-DQA1*02:01-B1*03:03L
  source 1..10: note = Severe acute respiratory syndrome coronavirus 2
AGFAKFLKTN

SEQ ID NO: 24581 - protein, 16 aa, Severe acute respiratory syndrome-related coronavirus
  REGION 1..16: note = Table B: HLA-DPA1*03:01-B1*105:01L
  source 1..16: note = Severe acute respiratory syndrome coronavirus 2
AKFLKTNCCRFQEKDE

SEQ ID NO: 24582 - protein, 18 aa, Severe acute respiratory syndrome-related coronavirus
  REGION 1..18: note = Table B: HLA-DPA1*03:01-B1*105:01L
  source 1..18: note = Severe acute respiratory syndrome coronavirus 2
KFLKTNCCRFQEKDEDDN

SEQ ID NO: 24583 - protein, 12 aa, Severe acute respiratory syndrome-related coronavirus
  REGION 1..12: note = Table B: HLA-DPA1*03:01-B1*105:01L HLA-DRB1*04:08L
  source 1..12: note = Severe acute respiratory syndrome coronavirus 2
IDGDMVPHISRQ

SEQ ID NO: 24584 - protein, 15 aa, Severe acute respiratory syndrome-related coronavirus
  REGION 1..15: note = Table B: HLA-DPA1*03:01-B1*105:01L
  source 1..15: note = Severe acute respiratory syndrome coronavirus 2
VYALRHFDEGNCDTL

SEQ ID NO: 24585 - protein, 17 aa, Severe acute respiratory syndrome-related coronavirus
  REGION 1..17: note = Table B: HLA-DPA1*03:01-B1*105:01L
  source 1..17: note = Severe acute respiratory syndrome coronavirus 2
ALRHFDEGNCDTLKEIL

SEQ ID NO: 24586 - protein, 16 aa, Severe acute respiratory syndrome-related coronavirus
  REGION 1..16: note = Table B: HLA-DPA1*03:01-B1*105:01L
  source 1..16: note = Severe acute respiratory syndrome coronavirus 2
LVTYNCCDDDYFNKKD

SEQ ID NO: 24587 - protein, 12 aa, Severe acute respiratory syndrome-related coronavirus
  REGION 1..12: note = Table B: HLA-DPA1*03:01-B1*105:01L
  source 1..12: note = Severe acute respiratory syndrome coronavirus 2
VENPDILRVYAN

SEQ ID NO: 24588 - protein, 11 aa, Severe acute respiratory syndrome-related coronavirus
  REGION 1..11: note = Table B: HLA-DPA1*03:01-B1*105:01L
  source 1..11: note = Severe acute respiratory syndrome coronavirus 2
LLKTVQFCDAM

SEQ ID NO: 24589 - protein, 13 aa, Severe acute respiratory syndrome-related coronavirus
  REGION 1..13: note = Table B: HLA-DPA1*03:01-B1*105:01L
  source 1..13: note = Severe acute respiratory syndrome coronavirus 2
NWYDFGDFIQTTP

SEQ ID NO: 24590 - protein, 11 aa, Severe acute respiratory syndrome-related coronavirus
  REGION 1..11: note = Table B: HLA-DPA1*03:01-B1*105:01L
  source 1..11: note = Severe acute respiratory syndrome coronavirus 2
SYYSLLMPILT

SEQ ID NO: 24591 - protein, 13 aa, Severe acute respiratory syndrome-related coronavirus
  REGION 1..13: note = Table B: HLA-DPA1*03:01-B1*105:01L
  source 1..13: note = Severe acute respiratory syndrome coronavirus 2
VDTDLTKPYIKWD

SEQ ID NO: 24592 - protein, 12 aa, Severe acute respiratory syndrome-related coronavirus
  REGION 1..12: note = Table B: HLA-DPA1*03:01-B1*105:01L
  source 1..12: note = Severe acute respiratory syndrome coronavirus 2
YIKWDLLKYDFT

SEQ ID NO: 24593 - protein, 12 aa, Severe acute respiratory syndrome-related coronavirus
  REGION 1..12: note = Table B: HLA-DPA1*03:01-B1*105:01L HLA-DPA1*01:02-B1*04:01L
  source 1..12: note = Severe acute respiratory syndrome coronavirus 2
IKWDLLKYDFTE

SEQ ID NO: 24594 - protein, 14 aa, Severe acute respiratory syndrome-related coronavirus
  REGION 1..14: note = Table B: HLA-DPA1*03:01-B1*105:01L
  source 1..14: note = Severe acute respiratory syndrome coronavirus 2
YDFTEERLKLFDRY

SEQ ID NO: 24595 - protein, 14 aa, Severe acute respiratory syndrome-related coronavirus
  REGION 1..14: note = Table B: HLA-DPA1*03:01-B1*105:01L
  source 1..14: note = Severe acute respiratory syndrome coronavirus 2
VVHNQDVNLHSSRL

SEQ ID NO: 24596 - protein, 13 aa, Severe acute respiratory syndrome-related coronavirus
  REGION 1..13: note = Table B: HLA-DPA1*03:01-B1*105:01L
  source 1..13: note = Severe acute respiratory syndrome coronavirus 2
LSFKELLVYAADP

SEQ ID NO: 24597 - protein, 12 aa, Severe acute respiratory syndrome-related coronavirus
  REGION 1..12: note = Table B: HLA-DPA1*03:01-B1*105:01L
  source 1..12: note = Severe acute respiratory syndrome coronavirus 2
AASGNLLLDKRT

SEQ ID NO: 24598 - protein, 14 aa, Severe acute respiratory syndrome-related coronavirus
  REGION 1..14: note = Table B: HLA-DPA1*03:01-B1*105:01L
  source 1..14: note = Severe acute respiratory syndrome coronavirus 2
TTCFSVAALTNNVA

SEQ ID NO: 24599 - protein, 13 aa, Severe acute respiratory syndrome-related coronavirus
  REGION 1..13: note = Table B: HLA-DPA1*03:01-B1*105:01L
  source 1..13: note = Severe acute respiratory syndrome coronavirus 2
AQDGNAAISDYDY

SEQ ID NO: 24600 - protein, 13 aa, Severe acute respiratory syndrome-related coronavirus
  REGION 1..13: note = Table B: HLA-DPA1*03:01-B1*105:01L
  source 1..13: note = Severe acute respiratory syndrome coronavirus 2
DIRQLLFVVEVVD

SEQ ID NO: 24601 - protein, 16 aa, Severe acute respiratory syndrome-related coronavirus
  REGION 1..16: note = Table B: HLA-DPA1*03:01-B1*105:01L
  source 1..16: note = Severe acute respiratory syndrome coronavirus 2
PFNKWGKARLYYDSMS

SEQ ID NO: 24602 - protein, 13 aa, Severe acute respiratory syndrome-related coronavirus
  REGION 1..13: note = Table B: HLA-DPA1*03:01-B1*105:01L HLA-DQA1*05:05-B1*03:01L
  source 1..13: note = Severe acute respiratory syndrome coronavirus 2
ARTVAGVSICSTM

SEQ ID NO: 24603 - protein, 14 aa, Severe acute respiratory syndrome-related coronavirus
  REGION 1..14: note = Table B: HLA-DPA1*03:01-B1*105:01L
  source 1..14: note = Severe acute respiratory syndrome coronavirus 2
RTVAGVSICSTMTN

SEQ ID NO: 24604 - protein, 14 aa, Severe acute respiratory syndrome-related coronavirus
  REGION 1..14: note = Table B: HLA-DPA1*03:01-B1*105:01L
  source 1..14: note = Severe acute respiratory syndrome coronavirus 2
LRIMASLVLARKHT

SEQ ID NO: 24605 - protein, 12 aa, Severe acute respiratory syndrome-related coronavirus
  REGION 1..12: note = Table B: HLA-DPA1*03:01-B1*105:01L HLA-DQA1*05:05-B1*03:01L
  source 1..12: note = Severe acute respiratory syndrome coronavirus 2
LANECAQVLSEM

SEQ ID NO: 24606 - protein, 12 aa, Severe acute respiratory syndrome-related coronavirus
  REGION 1..12: note = Table B: HLA-DPA1*03:01-B1*105:01L
  source 1..12: note = Severe acute respiratory syndrome coronavirus 2
LYYQNNVFMSEA

SEQ ID NO: 24607 - protein, 12 aa, Severe acute respiratory syndrome-related coronavirus
  REGION 1..12: note = Table B: HLA-DPA1*03:01-B1*105:01L
  source 1..12: note = Severe acute respiratory syndrome coronavirus 2
FVSLAIDAYPLT

SEQ ID NO: 24608 - protein, 13 aa, Severe acute respiratory syndrome-related coronavirus
  REGION 1..13: note = Table B: HLA-DPA1*03:01-B1*105:01L
  source 1..13: note = Severe acute respiratory syndrome coronavirus 2
NTSRYWEPEFYEA

SEQ ID NO: 24609 - protein, 12 aa, Severe acute respiratory syndrome-related coronavirus
  REGION 1..12: note = Table B: HLA-DPA1*03:01-B1*105:01L
  source 1..12: note = Severe acute respiratory syndrome coronavirus 2
WEPEFYEAMYTP

SEQ ID NO: 24610 - protein, 12 aa, Severe acute respiratory syndrome-related coronavirus
  REGION 1..12: note = Table B: HLA-DPA1*03:01-B1*105:01L
  source 1..12: note = Severe acute respiratory syndrome coronavirus 2
LSVNPYVCNAPG

SEQ ID NO: 24611 - protein, 12 aa, Severe acute respiratory syndrome-related coronavirus
  REGION 1..12: note = Table B: HLA-DPA1*03:01-B1*105:01L
  source 1..12: note = Severe acute respiratory syndrome coronavirus 2
TFEKGDYGDAVV

SEQ ID NO: 24612 - protein, 12 aa, Severe acute respiratory syndrome-related coronavirus
  REGION 1..12: note = Table B: HLA-DPA1*03:01-B1*105:01L HLA-DRB1*04:08L
  source 1..12: note = Severe acute respiratory syndrome coronavirus 2
YGDAVVYRGTTT

SEQ ID NO: 24613 - protein, 12 aa, Severe acute respiratory syndrome-related coronavirus
  REGION 1..12: note = Table B: HLA-DPA1*03:01-B1*105:01L
  source 1..12: note = Severe acute respiratory syndrome coronavirus 2
HFAIGLALYYPS

SEQ ID NO: 24614 - protein, 12 aa, Severe acute respiratory syndrome-related coronavirus
  REGION 1..12: note = Table B: HLA-DPA1*03:01-B1*105:01L
  source 1..12: note = Severe acute respiratory syndrome coronavirus 2
FAIGLALYYPSA

SEQ ID NO: 24615 - protein, 14 aa, Severe acute respiratory syndrome-related coronavirus
  REGION 1..14: note = Table B: HLA-DPA1*03:01-B1*105:01L
  source 1..14: note = Severe acute respiratory syndrome coronavirus 2
LPIDKCSRIIPARA

SEQ ID NO: 24616 - protein, 16 aa, Severe acute respiratory syndrome-related coronavirus
  REGION 1..16: note = Table B: HLA-DPA1*03:01-B1*105:01L
  source 1..16: note = Severe acute respiratory syndrome coronavirus 2
ARVECFDKFKVNSTLE

SEQ ID NO: 24617 - protein, 13 aa, Severe acute respiratory syndrome-related coronavirus
  REGION 1..13: note = Table B: HLA-DPA1*03:01-B1*105:01L
  source 1..13: note = Severe acute respiratory syndrome coronavirus 2
MKTIGPDMFLGTC

SEQ ID NO: 24618 - protein, 15 aa, Severe acute respiratory syndrome-related coronavirus
  REGION 1..15: note = Table B: HLA-DPA1*03:01-B1*105:01L
  source 1..15: note = Severe acute respiratory syndrome coronavirus 2
PAWRKAVFISPYNSQ

SEQ ID NO: 24619 - protein, 13 aa, Severe acute respiratory syndrome-related coronavirus
  REGION 1..13: note = Table B: HLA-DPA1*03:01-B1*105:01L
  source 1..13: note = Severe acute respiratory syndrome coronavirus 2
SQNAVASKILGLP

SEQ ID NO: 24620 - protein, 11 aa, Severe acute respiratory syndrome-related coronavirus
  REGION 1..11: note = Table B: HLA-DPA1*03:01-B1*105:01L HLA-DPA1*01:02-B1*04:01L HLA-DQA1*02:01-B1*03:03L
  source 1..11: note = Severe acute respiratory syndrome coronavirus 2
VASKILGLPTQ

SEQ ID NO: 24621 - protein, 16 aa, Severe acute respiratory syndrome-related coronavirus
  REGION 1..16: note = Table B: HLA-DPA1*03:01-B1*105:01L HLA-DQA1*03:01-B1*03:02L HLA-DRB1*15:03L
  source 1..16: note = Severe acute respiratory syndrome coronavirus 2
ITRAKVGILCIMSDRD

SEQ ID NO: 24622 - protein, 13 aa, Severe acute respiratory syndrome-related coronavirus
  REGION 1..13: note = Table B: HLA-DPA1*03:01-B1*105:01L HLA-DQA1*05:05-B1*03:01L HLA-DQA1*01:03-B1*06:01L HLA-DQA1*02:01-B1*03:03L
  source 1..13: note = Severe acute respiratory syndrome coronavirus 2
ISMMGFKMNYQVN

SEQ ID NO: 24623 - protein, 12 aa, Severe acute respiratory syndrome-related coronavirus
  REGION 1..12: note = Table B: HLA-DPA1*03:01-B1*105:01L
  source 1..12: note = Severe acute respiratory syndrome coronavirus 2
WIGFDVEGCHAT

SEQ ID NO: 24624 - protein, 12 aa, Severe acute respiratory syndrome-related coronavirus
  REGION 1..12: note = Table B: HLA-DPA1*03:01-B1*105:01L
  source 1..12: note = Severe acute respiratory syndrome coronavirus 2
VQMLSDTLKNLS

SEQ ID NO: 24625 - protein, 14 aa, Severe acute respiratory syndrome-related coronavirus
  REGION 1..14: note = Table B: HLA-DPA1*03:01-B1*105:01L
  source 1..14: note = Severe acute respiratory syndrome coronavirus 2
DTLKNLSDRVVFVL

SEQ ID NO: 24626 - protein, 14 aa, Severe acute respiratory syndrome-related coronavirus
  REGION 1..14: note = Table B: HLA-DPA1*03:01-B1*105:01L HLA-DQA1*01:03-B1*06:01L HLA-DRB1*15:03L
  source 1..14: note = Severe acute respiratory syndrome coronavirus 2
ELTSMKYFVKIGPE

SEQ ID NO: 24627 - protein, 13 aa, Severe acute respiratory syndrome-related coronavirus
  REGION 1..13: note = Table B: HLA-DPA1*03:01-B1*105:01L
  source 1..13: note = Severe acute respiratory syndrome coronavirus 2
HHSIGFDYVYNPF

SEQ ID NO: 24628 - protein, 13 aa, Severe acute respiratory syndrome-related coronavirus
  REGION 1..13: note = Table B: HLA-DPA1*03:01-B1*105:01L
  source 1..13: note = Severe acute respiratory syndrome coronavirus 2
NLQSNHDLYCQVH

SEQ ID NO: 24629 - protein, 14 aa, Severe acute respiratory syndrome-related coronavirus
  REGION 1..14: note = Table B: HLA-DPA1*03:01-B1*105:01L HLA-DQA1*01:03-B1*06:01L
  source 1..14: note = Severe acute respiratory syndrome coronavirus 2
LQSNHDLYCQVHGN

SEQ ID NO: 24630 - protein, 11 aa, Severe acute respiratory syndrome-related coronavirus
  REGION 1..11: note = Table B: HLA-DPA1*03:01-B1*105:01L HLA-DQA1*01:03-B1*06:01L HLA-DQA1*02:01-B1*03:03L
  source 1..11: note = Severe acute respiratory syndrome coronavirus 2
WTIEYPIIGDE

SEQ ID NO: 24631 - protein, 14 aa, Severe acute respiratory syndrome-related coronavirus
  REGION 1..14: note = Table B: HLA-DPA1*03:01-B1*105:01L
  source 1..14: note = Severe acute respiratory syndrome coronavirus 2
PQADVEWKFYDAQP

SEQ ID NO: 24632 - protein, 17 aa, Severe acute respiratory syndrome-related coronavirus
  REGION 1..17: note = Table B: HLA-DPA1*03:01-B1*105:01L
  source 1..17: note = Severe acute respiratory syndrome coronavirus 2
DKFTDGVCLFWNCNVDR

SEQ ID NO: 24633 - protein, 11 aa, Severe acute respiratory syndrome-related coronavirus
  REGION 1..11: note = Table B: HLA-DPA1*03:01-B1*105:01L HLA-DPA1*01:02-B1*04:01L
  source 1..11: note = Severe acute respiratory syndrome coronavirus 2
FWNCNVDRYPA

SEQ ID NO: 24634 - protein, 13 aa, Severe acute respiratory syndrome-related coronavirus
  REGION 1..13: note = Table B: HLA-DPA1*03:01-B1*105:01L
  source 1..13: note = Severe acute respiratory syndrome coronavirus 2
LKQLPFFYYSDSP

SEQ ID NO: 24635 - protein, 12 aa, Severe acute respiratory syndrome-related coronavirus
  REGION 1..12: note = Table B: HLA-DPA1*03:01-B1*105:01L
  source 1..12: note = Severe acute respiratory syndrome coronavirus 2
SAGFSLWVYKQF

SEQ ID NO: 24636 - protein, 12 aa, Severe acute respiratory syndrome-related coronavirus
  REGION 1..12: note = Table B: HLA-DPA1*03:01-B1*105:01L
  source 1..12: note = Severe acute respiratory syndrome coronavirus 2
QFDTYNLWNTFT

SEQ ID NO: 24637 - protein, 10 aa, Severe acute respiratory syndrome-related coronavirus
  REGION 1..10: note = Table B: HLA-DPA1*03:01-B1*105:01L HLA-DQA1*03:01-B1*03:02L HLA-DPA1*01:02-B1*04:01L
  source 1..10: note = Severe acute respiratory syndrome coronavirus 2
TYNLWNTFTR

SEQ ID NO: 24638 - protein, 13 aa, Severe acute respiratory syndrome-related coronavirus
  REGION 1..13: note = Table B: HLA-DPA1*03:01-B1*105:01L
  source 1..13: note = Severe acute respiratory syndrome coronavirus 2
LNNLGVDIAANTV

SEQ ID NO: 24639 - protein, 14 aa, Severe acute respiratory syndrome-related coronavirus
  REGION 1..14: note = Table B: HLA-DPA1*03:01-B1*105:01L
  source 1..14: note = Severe acute respiratory syndrome coronavirus 2
NNLGVDIAANTVIW

SEQ ID NO: 24640 - protein, 14 aa, Severe acute respiratory syndrome-related coronavirus
  REGION 1..14: note = Table B: HLA-DPA1*03:01-B1*105:01L
  source 1..14: note = Severe acute respiratory syndrome coronavirus 2
PAHISTIGVCSMTD

SEQ ID NO: 24641 - protein, 14 aa, Severe acute respiratory syndrome-related coronavirus
  REGION 1..14: note = Table B: HLA-DPA1*03:01-B1*105:01L
  source 1..14: note = Severe acute respiratory syndrome coronavirus 2
HISTIGVCSMTDIA

SEQ ID NO: 24642 - protein, 14 aa, Severe acute respiratory syndrome-related coronavirus
  REGION 1..14: note = Table B: HLA-DPA1*03:01-B1*105:01L HLA-DQA1*05:05-B1*03:01L HLA-DQA1*02:01-B1*03:03L
  source 1..14: note = Severe acute respiratory syndrome coronavirus 2
ISTIGVCSMTDIAK

SEQ ID NO: 24643 - protein, 16 aa, Severe acute respiratory syndrome-related coronavirus
  REGION 1..16: note = Table B: HLA-DPA1*03:01-B1*105:01L
  source 1..16: note = Severe acute respiratory syndrome coronavirus 2
KPTETICAPLTVFFDG

SEQ ID NO: 24644 - protein, 14 aa, Severe acute respiratory syndrome-related coronavirus
  REGION 1..14: note = Table B: HLA-DPA1*03:01-B1*105:01L
  source 1..14: note = Severe acute respiratory syndrome coronavirus 2
GLQPSVGPKQASLN

SEQ ID NO: 24645 - protein, 14 aa, Severe acute respiratory syndrome-related coronavirus
  REGION 1..14: note = Table B: HLA-DPA1*03:01-B1*105:01L HLA-DQA1*01:03-B1*06:01L
  source 1..14: note = Severe acute respiratory syndrome coronavirus 2
AVKTQFNYYKKVDG

SEQ ID NO: 24646 - protein, 13 aa, Severe acute respiratory syndrome-related coronavirus
  REGION 1..13: note = Table B: HLA-DPA1*03:01-B1*105:01L
  source 1..13: note = Severe acute respiratory syndrome coronavirus 2
PRSQMEIDFLELA

SEQ ID NO: 24647 - protein, 10 aa, Severe acute respiratory syndrome-related coronavirus
  REGION 1..10: note = Table B: HLA-DPA1*03:01-B1*105:01L HLA-DQA1*03:01-B1*03:02L HLA-DPA1*01:02-B1*04:01L HLA-DQA1*01:03-B1*06:01L HLA-DQA1*02:01-B1*03:03L
  source 1..10: note = Severe acute respiratory syndrome coronavirus 2
AMDEFIERYK

SEQ ID NO: 24648 - protein, 13 aa, Severe acute respiratory syndrome-related coronavirus
  REGION 1..13: note = Table B: HLA-DPA1*03:01-B1*105:01L
  source 1..13: note = Severe acute respiratory syndrome coronavirus 2
SQLGGLHLLIGLA

SEQ ID NO: 24649 - protein, 12 aa, Severe acute respiratory syndrome-related coronavirus
  REGION 1..12: note = Table B: HLA-DPA1*03:01-B1*105:01L HLA-DRB1*15:03L
  source 1..12: note = Severe acute respiratory syndrome coronavirus 2
DLSVVSKVVKVT

SEQ ID NO: 24650 - protein, 16 aa, Severe acute respiratory syndrome-related coronavirus
  REGION 1..16: note = Table B: HLA-DPA1*03:01-B1*105:01L HLA-DRB1*15:03L
  source 1..16: note = Severe acute respiratory syndrome coronavirus 2
FMLWCKDGHVETFYPK

SEQ ID NO: 24651 - protein, 15 aa, Severe acute respiratory syndrome-related coronavirus
  REGION 1..15: note = Table B: HLA-DPA1*03:01-B1*105:01L
  source 1..15: note = Severe acute respiratory syndrome coronavirus 2
LYKMQRMLLEKCDLQ

SEQ ID NO: 24652 - protein, 12 aa, Severe acute respiratory syndrome-related coronavirus
  REGION 1..12: note = Table B: HLA-DPA1*03:01-B1*105:01L
  source 1..12: note = Severe acute respiratory syndrome coronavirus 2
KYTQLCQYLNTL

SEQ ID NO: 24653 - protein, 14 aa, Severe acute respiratory syndrome-related coronavirus
  REGION 1..14: note = Table B: HLA-DPA1*03:01-B1*105:01L
  source 1..14: note = Severe acute respiratory syndrome coronavirus 2
NMRVIHFGAGSDKG

SEQ ID NO: 24654 - protein, 12 aa, Severe acute respiratory syndrome-related coronavirus
  REGION 1..12: note = Table B: HLA-DPA1*03:01-B1*105:01L
  source 1..12: note = Severe acute respiratory syndrome coronavirus 2
WDLIISDMYDPK

SEQ ID NO: 24655 - protein, 12 aa, Severe acute respiratory syndrome-related coronavirus
  REGION 1..12: note = Table B: HLA-DPA1*03:01-B1*105:01L HLA-DRB1*15:03L
  source 1..12: note = Severe acute respiratory syndrome coronavirus 2
LIISDMYDPKTK

SEQ ID NO: 24656 - protein, 14 aa, Severe acute respiratory syndrome-related coronavirus
  REGION 1..14: note = Table B: HLA-DPA1*03:01-B1*105:01L
  source 1..14: note = Severe acute respiratory syndrome coronavirus 2
ICGFIQQKLALGGS

SEQ ID NO: 24657 - protein, 11 aa, Severe acute respiratory syndrome-related coronavirus
  REGION 1..11: note = Table B: HLA-DPA1*03:01-B1*105:01L
  source 1..11: note = Severe acute respiratory syndrome coronavirus 2
LGGSVAIKITE

SEQ ID NO: 24658 - protein, 12 aa, Severe acute respiratory syndrome-related coronavirus
  REGION 1..12: note = Table B: HLA-DPA1*03:01-B1*105:01L HLA-DQA1*03:01-B1*03:02L
  source 1..12: note = Severe acute respiratory syndrome coronavirus 2
NADLYKLMGHFA

SEQ ID NO: 24659 - protein, 13 aa, Severe acute respiratory syndrome-related coronavirus
  REGION 1..13: note = Table B: HLA-DPA1*03:01-B1*105:01L
  source 1..13: note = Severe acute respiratory syndrome coronavirus 2
ASSSEAFLIGCNY

SEQ ID NO: 24660 - protein, 12 aa, Severe acute respiratory syndrome-related coronavirus
  REGION 1..12: note = Table B: HLA-DPA1*03:01-B1*105:01L
  source 1..12: note = Severe acute respiratory syndrome coronavirus 2
AFLIGCNYLGKP

SEQ ID NO: 24661 - protein, 11 aa, Severe acute respiratory syndrome-related coronavirus
  REGION 1..11: note = Table B: HLA-DPA1*03:01-B1*105:01L
  source 1..11: note = Severe acute respiratory syndrome coronavirus 2
FVFLVLLPLVS

SEQ ID NO: 24662 - protein, 12 aa, Severe acute respiratory syndrome-related coronavirus
  REGION 1..12: note = Table B: HLA-DPA1*03:01-B1*105:01L
  source 1..12: note = Severe acute respiratory syndrome coronavirus 2
VFLVLLPLVSSQ

SEQ ID NO: 24663 - protein, 12 aa, Severe acute respiratory syndrome-related coronavirus
  REGION 1..12: note = Table B: HLA-DPA1*03:01-B1*105:01L HLA-DRB1*04:08L
  source 1..12: note = Severe acute respiratory syndrome coronavirus 2
TWFHAIHVSGTN

SEQ ID NO: 24664 - protein, 13 aa, Severe acute respiratory syndrome-related coronavirus
  REGION 1..13: note = Table B: HLA-DPA1*03:01-B1*105:01L
  source 1..13: note = Severe acute respiratory syndrome coronavirus 2
PFNDGVYFASTEK

SEQ ID NO: 24665 - protein, 11 aa, Severe acute respiratory syndrome-related coronavirus
  REGION 1..11: note = Table B: HLA-DPA1*03:01-B1*105:01L HLA-DRB1*08:02L
  source 1..11: note = Severe acute respiratory syndrome coronavirus 2
STEKSNIIRGW

SEQ ID NO: 24666 - protein, 12 aa, Severe acute respiratory syndrome-related coronavirus
  REGION 1..12: note = Table B: HLA-DPA1*03:01-B1*105:01L HLA-DQA1*05:05-B1*03:01L HLA-DQA1*02:01-B1*03:03L
  source 1..12: note = Severe acute respiratory syndrome coronavirus 2
ATNVVIKVCEFQ

SEQ ID NO: 24667 - protein, 14 aa, Severe acute respiratory syndrome-related coronavirus
  REGION 1..14: note = Table B: HLA-DPA1*03:01-B1*105:01L
  source 1..14: note = Severe acute respiratory syndrome coronavirus 2
SSANNCTFEYVSQP

SEQ ID NO: 24668 - protein, 12 aa, Severe acute respiratory syndrome-related coronavirus
  REGION 1..12: note = Table B: HLA-DPA1*03:01-B1*105:01L HLA-DQA1*01:03-B1*06:01L HLA-DQA1*02:01-B1*03:03L
  source 1..12: note = Severe acute respiratory syndrome coronavirus 2
SSSGWTAGAAAY

SEQ ID NO: 24669 - protein, 10 aa, Severe acute respiratory syndrome-related coronavirus
  REGION 1..10: note = Table B: HLA-DPA1*03:01-B1*105:01L HLA-DQA1*03:01-B1*03:02L HLA-DPA1*01:02-B1*04:01L HLA-DQA1*01:03-B1*06:01L HLA-DQA1*02:01-B1*03:03L
  source 1..10: note = Severe acute respiratory syndrome coronavirus 2
PFGEVFNATR

SEQ ID NO: 24670 - protein, 14 aa, Severe acute respiratory syndrome-related coronavirus
  REGION 1..14: note = Table B: HLA-DPA1*03:01-B1*105:01L HLA-DQA1*01:03-B1*06:01L
  source 1..14: note = Severe acute respiratory syndrome coronavirus 2
KLNDLCFTNVYADS

SEQ ID NO: 24671 - protein, 15 aa, Severe acute respiratory syndrome-related coronavirus
  REGION 1..15: note = Table B: HLA-DPA1*03:01-B1*105:01L
  source 1..15: note = Severe acute respiratory syndrome coronavirus 2
YNYKLPDDFTGCVIA

SEQ ID NO: 24672 - protein, 15 aa, Severe acute respiratory syndrome-related coronavirus
  REGION 1..15: note = Table B: HLA-DPA1*03:01-B1*105:01L
  source 1..15: note = Severe acute respiratory syndrome coronavirus 2
YRLFRKSNLKPFERD

SEQ ID NO: 24673 - protein, 13 aa, Severe acute respiratory syndrome-related coronavirus
  REGION 1..13: note = Table B: HLA-DPA1*03:01-B1*105:01L
  source 1..13: note = Severe acute respiratory syndrome coronavirus 2
FERDISTEIYQAG

SEQ ID NO: 24674 - protein, 13 aa, Severe acute respiratory syndrome-related coronavirus
  REGION 1..13: note = Table B: HLA-DPA1*03:01-B1*105:01L
  source 1..13: note = Severe acute respiratory syndrome coronavirus 2
ERDISTEIYQAGS

SEQ ID NO: 24675 - protein, 13 aa, Severe acute respiratory syndrome-related coronavirus
  REGION 1..13: note = Table B: HLA-DPA1*03:01-B1*105:01L HLA-DQA1*02:01-B1*03:03L
  source 1..13: note = Severe acute respiratory syndrome coronavirus 2
RDISTEIYQAGST

SEQ ID NO: 24676 - protein, 12 aa, Severe acute respiratory syndrome-related coronavirus
  REGION 1..12: note = Table B: HLA-DPA1*03:01-B1*105:01L
  source 1..12: note = Severe acute respiratory syndrome coronavirus 2
NGVGYQPYRVVV

SEQ ID NO: 24677 - protein, 15 aa, Severe acute respiratory syndrome-related coronavirus
  REGION 1..15: note = Table B: HLA-DPA1*03:01-B1*105:01L
  source 1..15: note = Severe acute respiratory syndrome coronavirus 2
PFQQFGRDIADTTDA

SEQ ID NO: 24678 - protein, 15 aa, Severe acute respiratory syndrome-related coronavirus
  REGION 1..15: note = Table B: HLA-DPA1*03:01-B1*105:01L
  source 1..15: note = Severe acute respiratory syndrome coronavirus 2
AEHVNNSYECDIPIG

SEQ ID NO: 24679 - protein, 14 aa, Severe acute respiratory syndrome-related coronavirus
  REGION 1..14: note = Table B: HLA-DPA1*03:01-B1*105:01L HLA-DQA1*01:03-B1*06:01L
  source 1..14: note = Severe acute respiratory syndrome coronavirus 2
KTSVDCTMYICGDS

SEQ ID NO: 24680 - protein, 13 aa, Severe acute respiratory syndrome-related coronavirus
  REGION 1..13: note = Table B: HLA-DPA1*03:01-B1*105:01L
  source 1..13: note = Severe acute respiratory syndrome coronavirus 2
DSTECSNLLLQYG

SEQ ID NO: 24681 - protein, 14 aa, Severe acute respiratory syndrome-related coronavirus
  REGION 1..14: note = Table B: HLA-DPA1*03:01-B1*105:01L
  source 1..14: note = Severe acute respiratory syndrome coronavirus 2
STECSNLLLQYGSF

SEQ ID NO: 24682 - protein, 11 aa, Severe acute respiratory syndrome-related coronavirus
  REGION 1..11: note = Table B: HLA-DPA1*03:01-B1*105:01L HLA-DQA1*01:03-B1*06:01L
  source 1..11: note = Severe acute respiratory syndrome coronavirus 2
LQYGSFCTQLN

SEQ ID NO: 24683 - protein, 12 aa, Severe acute respiratory syndrome-related coronavirus
  REGION 1..12: note = Table B: HLA-DPA1*03:01-B1*105:01L
  source 1..12: note = Severe acute respiratory syndrome coronavirus 2
YGSFCTQLNRAL

SEQ ID NO: 24684 - protein, 12 aa, Severe acute respiratory syndrome-related coronavirus
  REGION 1..12: note = Table B: HLA-DPA1*03:01-B1*105:01L HLA-DQA1*02:01-B1*03:03L
  source 1..12: note = Severe acute respiratory syndrome coronavirus 2
GSFCTQLNRALT

SEQ ID NO: 24685 - protein, 11 aa, Severe acute respiratory syndrome-related coronavirus
  REGION 1..11: note = Table B: HLA-DPA1*03:01-B1*105:01L
  source 1..11: note = Severe acute respiratory syndrome coronavirus 2
LTGIAVEQDKN

SEQ ID NO: 24686 - protein, 17 aa, Severe acute respiratory syndrome-related coronavirus
  REGION 1..17: note = Table B: HLA-DPA1*03:01-B1*105:01L
  source 1..17: note = Severe acute respiratory syndrome coronavirus 2
PPIKDFGGFNFSQILPD

SEQ ID NO: 24687 - protein, 11 aa, Severe acute respiratory syndrome-related coronavirus
  REGION 1..11: note = Table B: HLA-DPA1*03:01-B1*105:01L
  source 1..11: note = Severe acute respiratory syndrome coronavirus 2
GFNFSQILPDP

SEQ ID NO: 24688 - protein, 14 aa, Severe acute respiratory syndrome-related coronavirus
  REGION 1..14: note = Table B: HLA-DPA1*03:01-B1*105:01L
  source 1..14: note = Severe acute respiratory syndrome coronavirus 2
DIAARDLICAQKFN

SEQ ID NO: 24689 - protein, 13 aa, Severe acute respiratory syndrome-related coronavirus
  REGION 1..13: note = Table B: HLA-DPA1*03:01-B1*105:01L HLA-DQA1*01:03-B1*06:01L
  source 1..13: note = Severe acute respiratory syndrome coronavirus 2
PPLLTDEMIAQYT

SEQ ID NO: 24690 - protein, 14 aa, Severe acute respiratory syndrome-related coronavirus
  REGION 1..14: note = Table B: HLA-DPA1*03:01-B1*105:01L
  source 1..14: note = Severe acute respiratory syndrome coronavirus 2
PLLTDEMIAQYTSA

SEQ ID NO: 24691 - protein, 13 aa, Severe acute respiratory syndrome-related coronavirus
  REGION 1..13: note = Table B: HLA-DPA1*03:01-B1*105:01L
  source 1..13: note = Severe acute respiratory syndrome coronavirus 2
TITSGWTFGAGAA

SEQ ID NO: 24692 - protein, 12 aa, Severe acute respiratory syndrome-related coronavirus
  REGION 1..12: note = Table B: HLA-DPA1*03:01-B1*105:01L HLA-DQA1*05:05-B1*03:01L HLA-DQA1*02:01-B1*03:03L
  source 1..12: note = Severe acute respiratory syndrome coronavirus 2
TKMSECVLGQSK

SEQ ID NO: 24693 - protein, 13 aa, Severe acute respiratory syndrome-related coronavirus
  REGION 1..13: note = Table B: HLA-DPA1*03:01-B1*105:01L
  source 1..13: note = Severe acute respiratory syndrome coronavirus 2
FYEPQIITTDNTF

SEQ ID NO: 24694 - protein, 12 aa, Severe acute respiratory syndrome-related coronavirus
  REGION 1..12: note = Table B: HLA-DPA1*03:01-B1*105:01L
  source 1..12: note = Severe acute respiratory syndrome coronavirus 2
YEQYIKWPWYIW

SEQ ID NO: 24695 - protein, 12 aa, Severe acute respiratory syndrome-related coronavirus
  REGION 1..12: note = Table B: HLA-DPA1*03:01-B1*105:01L
  source 1..12: note = Severe acute respiratory syndrome coronavirus 2
LFMRIFTIGTVT

SEQ ID NO: 24696 - protein, 14 aa, Severe acute respiratory syndrome-related coronavirus
  REGION 1..14: note = Table B: HLA-DPA1*03:01-B1*105:01L HLA-DQA1*05:05-B1*03:01L
  source 1..14: note = Severe acute respiratory syndrome coronavirus 2
TVTLKQGEIKDATP

SEQ ID NO: 24697 - protein, 13 aa, Severe acute respiratory syndrome-related coronavirus
  REGION 1..13: note = Table B: HLA-DPA1*03:01-B1*105:01L
  source 1..13: note = Severe acute respiratory syndrome coronavirus 2
LKQGEIKDATPSD

SEQ ID NO: 24698 - protein, 18 aa, Severe acute respiratory syndrome-related coronavirus
  REGION 1..18: note = Table B: HLA-DPA1*03:01-B1*105:01L
  source 1..18: note = Severe acute respiratory syndrome coronavirus 2
ASKIITLKKRWQLALSKG

SEQ ID NO: 24699 - protein, 13 aa, Severe acute respiratory syndrome-related coronavirus
  REGION 1..13: note = Table B: HLA-DPA1*03:01-B1*105:01L HLA-DQA1*01:03-B1*06:01L
  source 1..13: note = Severe acute respiratory syndrome coronavirus 2
SPISEHDYQIGGY

SEQ ID NO: 24700 - protein, 12 aa, Severe acute respiratory syndrome-related coronavirus
  REGION 1..12: note = Table B: HLA-DPA1*03:01-B1*105:01L
  source 1..12: note = Severe acute respiratory syndrome coronavirus 2
SGVKDCVVLHSY

SEQ ID NO: 24701 - protein, 12 aa, Severe acute respiratory syndrome-related coronavirus
  REGION 1..12: note = Table B: HLA-DPA1*03:01-B1*105:01L
  source 1..12: note = Severe acute respiratory syndrome coronavirus 2
VKDCVVLHSYFT

SEQ ID NO: 24702 - protein, 12 aa, Severe acute respiratory syndrome-related coronavirus
  REGION 1..12: note = Table B: HLA-DPA1*03:01-B1*105:01L HLA-DRB1*15:03L
  source 1..12: note = Severe acute respiratory syndrome coronavirus 2
VLHSYFTSDYYQ

SEQ ID NO: 24703 - protein, 14 aa, Severe acute respiratory syndrome-related coronavirus
  REGION 1..14: note = Table B: HLA-DPA1*03:01-B1*105:01L
  source 1..14: note = Severe acute respiratory syndrome coronavirus 2
LYSTQLSTDTGVEH

SEQ ID NO: 24704 - protein, 15 aa, Severe acute respiratory syndrome-related coronavirus
  REGION 1..15: note = Table B: HLA-DPA1*03:01-B1*105:01L
  source 1..15: note = Severe acute respiratory syndrome coronavirus 2
ALRLCAYCCNIVNVS

SEQ ID NO: 24705 - protein, 10 aa, Severe acute respiratory syndrome-related coronavirus
  REGION 1..10: note = Table B: HLA-DPA1*03:01-B1*105:01L HLA-DQA1*01:03-B1*06:01L
  source 1..10: note = Severe acute respiratory syndrome coronavirus 2
ITVEELKKLL

SEQ ID NO: 24706 - protein, 14 aa, Severe acute respiratory syndrome-related coronavirus
  REGION 1..14: note = Table B: HLA-DPA1*03:01-B1*105:01L
  source 1..14: note = Severe acute respiratory syndrome coronavirus 2
TWICLLQFAYANRN

SEQ ID NO: 24707 - protein, 15 aa, Severe acute respiratory syndrome-related coronavirus
  REGION 1..15: note = Table B: HLA-DPA1*03:01-B1*105:01L
  source 1..15: note = Severe acute respiratory syndrome coronavirus 2
WPVTLACFVLAAVYR

SEQ ID NO: 24708 - protein, 10 aa, Severe acute respiratory syndrome-related coronavirus
  REGION 1..10: note = Table B: HLA-DPA1*03:01-B1*105:01L HLA-DPA1*01:02-B1*04:01L
  source 1..10: note = Severe acute respiratory syndrome coronavirus 2
WLSYFIASFR

SEQ ID NO: 24709 - protein, 12 aa, Severe acute respiratory syndrome-related coronavirus
  REGION 1..12: note = Table B: HLA-DPA1*03:01-B1*105:01L HLA-DQA1*01:03-B1*06:01L
  source 1..12: note = Severe acute respiratory syndrome coronavirus 2
FNPETNILLNVP

SEQ ID NO: 24710 - protein, 10 aa, Severe acute respiratory syndrome-related coronavirus
  REGION 1..10: note = Table B: HLA-DPA1*03:01-B1*105:01L
  source 1..10: note = Severe acute respiratory syndrome coronavirus 2
IAEILLIIMR

SEQ ID NO: 24711 - protein, 11 aa, Severe acute respiratory syndrome-related coronavirus
  REGION 1..11: note = Table B: HLA-DPA1*03:01-B1*105:01L
  source 1..11: note = Severe acute respiratory syndrome coronavirus 2
LITLATCELYH

SEQ ID NO: 24712 - protein, 15 aa, Severe acute respiratory syndrome-related coronavirus
  REGION 1..15: note = Table B: HLA-DPA1*03:01-B1*105:01L HLA-DQA1*05:05-B1*03:01L HLA-DRB1*04:08L HLA-DRB1*15:03L
  source 1..15: note = Severe acute respiratory syndrome coronavirus 2
TTVLLKEPCSSGTYE

SEQ ID NO: 24713 - protein, 12 aa, Severe acute respiratory syndrome-related coronavirus
  REGION 1..12: note = Table B: HLA-DPA1*03:01-B1*105:01L
  source 1..12: note = Severe acute respiratory syndrome coronavirus 2
KFALTCFSTQFA

SEQ ID NO: 24714 - protein, 10 aa, Severe acute respiratory syndrome-related coronavirus
  REGION 1..10: note = Table B: HLA-DPA1*03:01-B1*105:01L
  source 1..10: note = Severe acute respiratory syndrome coronavirus 2
WFSLELQDHN

SEQ ID NO: 24715 - protein, 13 aa, Severe acute respiratory syndrome-related coronavirus
  REGION 1..13: note = Table B: HLA-DPA1*03:01-B1*105:01L HLA-DQA1*05:05-B1*03:01L HLA-DRB1*15:03L
  source 1..13: note = Severe acute respiratory syndrome coronavirus 2
VFLGIITTVAAFH

SEQ ID NO: 24716 - protein, 16 aa, Severe acute respiratory syndrome-related coronavirus
  REGION 1..16: note = Table B: HLA-DPA1*03:01-B1*105:01L HLA-DQA1*01:03-B1*06:01L
  source 1..16: note = Severe acute respiratory syndrome coronavirus 2
VGARKSAPLIELCVDE

SEQ ID NO: 24717 - protein, 16 aa, Severe acute respiratory syndrome-related coronavirus
  REGION 1..16: note = Table B: HLA-DPA1*03:01-B1*105:01L
  source 1..16: note = Severe acute respiratory syndrome coronavirus 2
PLIELCVDEAGSKSPI

SEQ ID NO: 24718 - protein, 11 aa, Severe acute respiratory syndrome-related coronavirus
  REGION 1..11: note = Table B: HLA-DPA1*03:01-B1*105:01L
  source 1..11: note = Severe acute respiratory syndrome coronavirus 2
YTVSCLPFTIN

SEQ ID NO: 24719 - protein, 14 aa, Severe acute respiratory syndrome-related coronavirus
  REGION 1..14: note = Table B: HLA-DPA1*03:01-B1*105:01L
  source 1..14: note = Severe acute respiratory syndrome coronavirus 2
PFTINCQEPKLGSL

SEQ ID NO: 24720 - protein, 14 aa, Severe acute respiratory syndrome-related coronavirus
  REGION 1..14: note = Table B: HLA-DPA1*03:01-B1*105:01L
  source 1..14: note = Severe acute respiratory syndrome coronavirus 2
EPKLGSLVVRCSFY

SEQ ID NO: 24721 - protein, 14 aa, Severe acute respiratory syndrome-related coronavirus
  REGION 1..14: note = Table B: HLA-DPA1*03:01-B1*105:01L HLA-DQA1*02:01-B1*03:03L
  source 1..14: note = Severe acute respiratory syndrome coronavirus 2
PNNTASWFTALTQH

SEQ ID NO: 24722 - protein, 13 aa, Severe acute respiratory syndrome-related coronavirus
  REGION 1..13: note = Table B: HLA-DPA1*03:01-B1*105:01L HLA-DRB1*15:03L
  source 1..13: note = Severe acute respiratory syndrome coronavirus 2
IIWVATEGALNTP

SEQ ID NO: 24723 - protein, 14 aa, Severe acute respiratory syndrome-related coronavirus
  REGION 1..14: note = Table B: HLA-DPA1*03:01-B1*105:01L
  source 1..14: note = Severe acute respiratory syndrome coronavirus 2
PANNAAIVLQLPQG

SEQ ID NO: 24724 - protein, 11 aa, Severe acute respiratory syndrome-related coronavirus
  REGION 1..11: note = Table B: HLA-DPA1*03:01-B1*105:01L
  source 1..11: note = Severe acute respiratory syndrome coronavirus 2
ALALLLLDRLN

SEQ ID NO: 24725 - protein, 15 aa, Severe acute respiratory syndrome-related coronavirus
  REGION 1..15: note = Table B: HLA-DPA1*03:01-B1*105:01L HLA-DRB1*15:01L
  source 1..15: note = Severe acute respiratory syndrome coronavirus 2
TKAYNVTQAFGRRGP

SEQ ID NO: 24726 - protein, 12 aa, Severe acute respiratory syndrome-related coronavirus
  REGION 1..12: note = Table B: HLA-DPA1*03:01-B1*105:01L HLA-DQA1*05:05-B1*03:01L
  source 1..12: note = Severe acute respiratory syndrome coronavirus 2
GDQELIRQGTDY

SEQ ID NO: 24727 - protein, 15 aa, Severe acute respiratory syndrome-related coronavirus
  REGION 1..15: note = Table B: HLA-DPA1*03:01-B1*105:01L
  source 1..15: note = Severe acute respiratory syndrome coronavirus 2
YKHWPQIAQFAPSAS

SEQ ID NO: 24728 - protein, 12 aa, Severe acute respiratory syndrome-related coronavirus
  REGION 1..12: note = Table B: HLA-DPA1*03:01-B1*105:01L
  source 1..12: note = Severe acute respiratory syndrome coronavirus 2
FPFTIYSLLLCR

SEQ ID NO: 24729 - protein, 13 aa, Severe acute respiratory syndrome-related coronavirus
  REGION 1..13: note = Table B: HLA-DPA1*03:01-B1*105:01L
  source 1..13: note = Severe acute respiratory syndrome coronavirus 2
IYSLLLCRMNSRN

SEQ ID NO: 24730 - protein, 10 aa, Severe acute respiratory syndrome-related coronavirus
  REGION 1..10: note = Table B: HLA-DQA1*03:01-B1*03:02L
  source 1..10: note = Severe acute respiratory syndrome coronavirus 2
PGFNEKTHVQ

SEQ ID NO: 24731 - protein, 11 aa, Severe acute respiratory syndrome-related coronavirus
  REGION 1..11: note = Table B: HLA-DQA1*03:01-B1*03:02L
  source 1..11: note = Severe acute respiratory syndrome coronavirus 2
THVQLSLPVLQ

SEQ ID NO: 24732 - protein, 10 aa, Severe acute respiratory syndrome-related coronavirus
  REGION 1..10: note = Table B: HLA-DQA1*03:01-B1*03:02L HLA-DQA1*05:05-B1*03:01L
  source 1..10: note = Severe acute respiratory syndrome coronavirus 2
QLSLPVLQVR

SEQ ID NO: 24733 - protein, 10 aa, Severe acute respiratory syndrome-related coronavirus
  REGION 1..10: note = Table B: HLA-DQA1*03:01-B1*03:02L
  source 1..10: note = Severe acute respiratory syndrome coronavirus 2
DVLVRGFGDS

SEQ ID NO: 24734 - protein, 10 aa, Severe acute respiratory syndrome-related coronavirus
  REGION 1..10: note = Table B: HLA-DQA1*03:01-B1*03:02L
  source 1..10: note = Severe acute respiratory syndrome coronavirus 2
VEEVLSEARQ

SEQ ID NO: 24735 - protein, 10 aa, Severe acute respiratory syndrome-related coronavirus
  REGION 1..10: note = Table B: HLA-DQA1*03:01-B1*03:02L
  source 1..10: note = Severe acute respiratory syndrome coronavirus 2
EEVLSEARQH

SEQ ID NO: 24736 - protein, 10 aa, Severe acute respiratory syndrome-related coronavirus
  REGION 1..10: note = Table B: HLA-DQA1*03:01-B1*03:02L
  source 1..10: note = Severe acute respiratory syndrome coronavirus 2
VLSEARQHLK

SEQ ID NO: 24737 - protein, 10 aa, Severe acute respiratory syndrome-related coronavirus
  REGION 1..10: note = Table B: HLA-DQA1*03:01-B1*03:02L
  source 1..10: note = Severe acute respiratory syndrome coronavirus 2
LEQPYVFIKR

SEQ ID NO: 24738 - protein, 10 aa, Severe acute respiratory syndrome-related coronavirus
  REGION 1..10: note = Table B: HLA-DQA1*03:01-B1*03:02L
  source 1..10: note = Severe acute respiratory syndrome coronavirus 2
QPYVFIKRSD

SEQ ID NO: 24739 - protein, 10 aa, Severe acute respiratory syndrome-related coronavirus
  REGION 1..10: note = Table B: HLA-DQA1*03:01-B1*03:02L
  source 1..10: note = Severe acute respiratory syndrome coronavirus 2
LEGIQYGRSG

SEQ ID NO: 24740 - protein, 10 aa, Severe acute respiratory syndrome-related coronavirus
  REGION 1..10: note = Table B: HLA-DQA1*03:01-B1*03:02L HLA-DQA1*02:01-B1*03:03L
  source 1..10: note = Severe acute respiratory syndrome coronavirus 2
GIQYGRSGET

SEQ ID NO: 24741 - protein, 10 aa, Severe acute respiratory syndrome-related coronavirus
  REGION 1..10: note = Table B: HLA-DQA1*03:01-B1*03:02L
  source 1..10: note = Severe acute respiratory syndrome coronavirus 2
VGEIPVAYRK

SEQ ID NO: 24742 - protein, 10 aa, Severe acute respiratory syndrome-related coronavirus
  REGION 1..10: note = Table B: HLA-DQA1*03:01-B1*03:02L
  source 1..10: note = Severe acute respiratory syndrome coronavirus 2
GGHSYGADLK

SEQ ID NO: 24743 - protein, 11 aa, Severe acute respiratory syndrome-related coronavirus
  REGION 1..11: note = Table B: HLA-DQA1*03:01-B1*03:02L
  source 1..11: note = Severe acute respiratory syndrome coronavirus 2
HSYGADLKSFD

SEQ ID NO: 24744 - protein, 11 aa, Severe acute respiratory syndrome-related coronavirus
  REGION 1..11: note = Table B: HLA-DQA1*03:01-B1*03:02L
  source 1..11: note = Severe acute respiratory syndrome coronavirus 2
YGADLKSFDLG

SEQ ID NO: 24745 - protein, 14 aa, Severe acute respiratory syndrome-related coronavirus
  REGION 1..14: note = Table B: HLA-DQA1*03:01-B1*03:02L
  source 1..14: note = Severe acute respiratory syndrome coronavirus 2
SFDLGDELGTDPYE

SEQ ID NO: 24746 - protein, 12 aa, Severe acute respiratory syndrome-related coronavirus
  REGION 1..12: note = Table B: HLA-DQA1*03:01-B1*03:02L HLA-DRB1*16:01L
  source 1..12: note = Severe acute respiratory syndrome coronavirus 2
TDPYEDFQENWN

SEQ ID NO: 24747 - protein, 10 aa, Severe acute respiratory syndrome-related coronavirus
  REGION 1..10: note = Table B: HLA-DQA1*03:01-B1*03:02L
  source 1..10: note = Severe acute respiratory syndrome coronavirus 2
EDFQENWNTK

SEQ ID NO: 24748 - protein, 11 aa, Severe acute respiratory syndrome-related coronavirus
  REGION 1..11: note = Table B: HLA-DQA1*03:01-B1*03:02L
  source 1..11: note = Severe acute respiratory syndrome coronavirus 2
DFQENWNTKHS

SEQ ID NO: 24749 - protein, 10 aa, Severe acute respiratory syndrome-related coronavirus
  REGION 1..10: note = Table B: HLA-DQA1*03:01-B1*03:02L
  source 1..10: note = Severe acute respiratory syndrome coronavirus 2
WNTKHSSGVT

SEQ ID NO: 24750 - protein, 10 aa, Severe acute respiratory syndrome-related coronavirus
  REGION 1..10: note = Table B: HLA-DQA1*03:01-B1*03:02L
  source 1..10: note = Severe acute respiratory syndrome coronavirus 2
TKHSSGVTRE

SEQ ID NO: 24751 - protein, 10 aa, Severe acute respiratory syndrome-related coronavirus
  REGION 1..10: note = Table B: HLA-DQA1*03:01-B1*03:02L
  source 1..10: note = Severe acute respiratory syndrome coronavirus 2
EHEIAWYTER

SEQ ID NO: 24752 - protein, 10 aa, Severe acute respiratory syndrome-related coronavirus
  REGION 1..10: note = Table B: HLA-DQA1*03:01-B1*03:02L
  source 1..10: note = Severe acute respiratory syndrome coronavirus 2
KLDGFMGRIR

SEQ ID NO: 24753 - protein, 10 aa, Severe acute respiratory syndrome-related coronavirus
  REGION 1..10: note = Table B: HLA-DQA1*03:01-B1*03:02L
  source 1..10: note = Severe acute respiratory syndrome coronavirus 2
RSVYPVASPN

SEQ ID NO: 24754 - protein, 11 aa, Severe acute respiratory syndrome-related coronavirus
  REGION 1..11: note = Table B: HLA-DQA1*03:01-B1*03:02L
  source 1..11: note = Severe acute respiratory syndrome coronavirus 2
GTENLTKEGAT

SEQ ID NO: 24755 - protein, 12 aa, Severe acute respiratory syndrome-related coronavirus
  REGION 1..12: note = Table B: HLA-DQA1*03:01-B1*03:02L
  source 1..12: note = Severe acute respiratory syndrome coronavirus 2
EVGPEHSLAEYH

SEQ ID NO: 24756 - protein, 11 aa, Severe acute respiratory syndrome-related coronavirus
  REGION 1..11: note = Table B: HLA-DQA1*03:01-B1*03:02L
  source 1..11: note = Severe acute respiratory syndrome coronavirus 2
GPEHSLAEYHN

SEQ ID NO: 24757 - protein, 13 aa, Severe acute respiratory syndrome-related coronavirus
  REGION 1..13: note = Table B: HLA-DQA1*03:01-B1*03:02L
  source 1..13: note = Severe acute respiratory syndrome coronavirus 2
PEHSLAEYHNESG

SEQ ID NO: 24758 - protein, 10 aa, Severe acute respiratory syndrome-related coronavirus
  REGION 1..10: note = Table B: HLA-DQA1*03:01-B1*03:02L
  source 1..10: note = Severe acute respiratory syndrome coronavirus 2
AEYHNESGLK

SEQ ID NO: 24759 - protein, 10 aa, Severe acute respiratory syndrome-related coronavirus
  REGION 1..10: note = Table B: HLA-DQA1*03:01-B1*03:02L
  source 1..10: note = Severe acute respiratory syndrome coronavirus 2
NESGLKTILR

SEQ ID NO: 24760 - protein, 10 aa, Severe acute respiratory syndrome-related coronavirus
  REGION 1..10: note = Table B: HLA-DQA1*03:01-B1*03:02L
  source 1..10: note = Severe acute respiratory syndrome coronavirus 2
ESGLKTILRK

SEQ ID NO: 24761 - protein, 10 aa, Severe acute respiratory syndrome-related coronavirus
  REGION 1..10: note = Table B: HLA-DQA1*03:01-B1*03:02L HLA-DQA1*02:01-B1*03:03L
  source 1..10: note = Severe acute respiratory syndrome coronavirus 2
AYWVPRASAN

SEQ ID NO: 24762 - protein, 11 aa, Severe acute respiratory syndrome-related coronavirus
  REGION 1..11: note = Table B: HLA-DQA1*03:01-B1*03:02L
  source 1..11: note = Severe acute respiratory syndrome coronavirus 2
VGEGSEGLNDN

SEQ ID NO: 24763 - protein, 10 aa, Severe acute respiratory syndrome-related coronavirus
  REGION 1..10: note = Table B: HLA-DQA1*03:01-B1*03:02L
  source 1..10: note = Severe acute respiratory syndrome coronavirus 2
NLLEILQKEK

SEQ ID NO: 24764 - protein, 12 aa, Severe acute respiratory syndrome-related coronavirus
  REGION 1..12: note = Table B: HLA-DQA1*03:01-B1*03:02L
  source 1..12: note = Severe acute respiratory syndrome coronavirus 2
TVKGLDYKAFKQ

SEQ ID NO: 24765 - protein, 11 aa, Severe acute respiratory syndrome-related coronavirus
  REGION 1..11: note = Table B: HLA-DQA1*03:01-B1*03:02L
  source 1..11: note = Severe acute respiratory syndrome coronavirus 2
DYKAFKQIVES

SEQ ID NO: 24766 - protein, 13 aa, Severe acute respiratory syndrome-related coronavirus
  REGION 1..13: note = Table B: HLA-DQA1*03:01-B1*03:02L
  source 1..13: note = Severe acute respiratory syndrome coronavirus 2
GKAKKGAWNIGEQ

SEQ ID NO: 24767 - protein, 10 aa, Severe acute respiratory syndrome-related coronavirus
  REGION 1..10: note = Table B: HLA-DQA1*03:01-B1*03:02L
  source 1..10: note = Severe acute respiratory syndrome coronavirus 2
KGAWNIGEQK

SEQ ID NO: 24768 - protein, 10 aa, Severe acute respiratory syndrome-related coronavirus
  REGION 1..10: note = Table B: HLA-DQA1*03:01-B1*03:02L HLA-DQA1*02:01-B1*03:03L
  source 1..10: note = Severe acute respiratory syndrome coronavirus 2
GAWNIGEQKS

SEQ ID NO: 24769 - protein, 10 aa, Severe acute respiratory syndrome-related coronavirus
  REGION 1..10: note = Table B: HLA-DQA1*03:01-B1*03:02L HLA-DQA1*02:01-B1*03:03L
  source 1..10: note = Severe acute respiratory syndrome coronavirus 2
ASEAARVVRS

SEQ ID NO: 24770 - protein, 11 aa, Severe acute respiratory syndrome-related coronavirus
  REGION 1..11: note = Table B: HLA-DQA1*03:01-B1*03:02L
  source 1..11: note = Severe acute respiratory syndrome coronavirus 2
AARVVRSIFSR

SEQ ID NO: 24771 - protein, 10 aa, Severe acute respiratory syndrome-related coronavirus
  REGION 1..10: note = Table B: HLA-DQA1*03:01-B1*03:02L
  source 1..10: note = Severe acute respiratory syndrome coronavirus 2
LDGISQYSLR

SEQ ID NO: 24772 - protein, 10 aa, Severe acute respiratory syndrome-related coronavirus
  REGION 1..10: note = Table B: HLA-DQA1*03:01-B1*03:02L
  source 1..10: note = Severe acute respiratory syndrome coronavirus 2
KFKEGVEFLR

SEQ ID NO: 24773 - protein, 11 aa, Severe acute respiratory syndrome-related coronavirus
  REGION 1..11: note = Table B: HLA-DQA1*03:01-B1*03:02L
  source 1..11: note = Severe acute respiratory syndrome coronavirus 2
EIKESVQTFFK

SEQ ID NO: 24774 - protein, 10 aa, Severe acute respiratory syndrome-related coronavirus
  REGION 1..10: note = Table B: HLA-DQA1*03:01-B1*03:02L
  source 1..10: note = Severe acute respiratory syndrome coronavirus 2
LNLGETFVTH

SEQ ID NO: 24775 - protein, 10 aa, Severe acute respiratory syndrome-related coronavirus
  REGION 1..10: note = Table B: HLA-DQA1*03:01-B1*03:02L HLA-DPA1*01:02-B1*04:01L
  source 1..10: note = Severe acute respiratory syndrome coronavirus 2
LGETFVTHSK

SEQ ID NO: 24776 - protein, 10 aa, Severe acute respiratory syndrome-related coronavirus
  REGION 1..10: note = Table B: HLA-DQA1*03:01-B1*03:02L
  source 1..10: note = Severe acute respiratory syndrome coronavirus 2
GLLMPLKAPK

SEQ ID NO: 24777 - protein, 12 aa, Severe acute respiratory syndrome-related coronavirus
  REGION 1..12: note = Table B: HLA-DQA1*03:01-B1*03:02L
  source 1..12: note = Severe acute respiratory syndrome coronavirus 2
GETLPTEVLTEE

SEQ ID NO: 24778 - protein, 10 aa, Severe acute respiratory syndrome-related coronavirus
  REGION 1..10: note = Table B: HLA-DQA1*03:01-B1*03:02L
  source 1..10: note = Severe acute respiratory syndrome coronavirus 2
MLLEIKDTEK

SEQ ID NO: 24779 - protein, 11 aa, Severe acute respiratory syndrome-related coronavirus
  REGION 1..11: note = Table B: HLA-DQA1*03:01-B1*03:02L
  source 1..11: note = Severe acute respiratory syndrome coronavirus 2
GAPTKVTFGDD

SEQ ID NO: 24780 - protein, 11 aa, Severe acute respiratory syndrome-related coronavirus
  REGION 1..11: note = Table B: HLA-DQA1*03:01-B1*03:02L
  source 1..11: note = Severe acute respiratory syndrome coronavirus 2
KVTFGDDTVIE

SEQ ID NO: 24781 - protein, 12 aa, Severe acute respiratory syndrome-related coronavirus
  REGION 1..12: note = Table B: HLA-DQA1*03:01-B1*03:02L
  source 1..12: note = Severe acute respiratory syndrome coronavirus 2
VTFGDDTVIEVQ

SEQ ID NO: 24782 - protein, 11 aa, Severe acute respiratory syndrome-related coronavirus
  REGION 1..11: note = Table B: HLA-DQA1*03:01-B1*03:02L
  source 1..11: note = Severe acute respiratory syndrome coronavirus 2
SVNITFELDER

SEQ ID NO: 24783 - protein, 10 aa, Severe acute respiratory syndrome-related coronavirus
  REGION 1..10: note = Table B: HLA-DQA1*03:01-B1*03:02L
  source 1..10: note = Severe acute respiratory syndrome coronavirus 2
TFELDERIDK

SEQ ID NO: 24784 - protein, 11 aa, Severe acute respiratory syndrome-related coronavirus
  REGION 1..11: note = Table B: HLA-DQA1*03:01-B1*03:02L
  source 1..11: note = Severe acute respiratory syndrome coronavirus 2
SELLTPLGIDL

SEQ ID NO: 24785 - protein, 10 aa, Severe acute respiratory syndrome-related coronavirus
  REGION 1..10: note = Table B: HLA-DQA1*03:01-B1*03:02L HLA-DPA1*01:02-B1*04:01L HLA-DQA1*01:03-B1*06:01L HLA-DQA1*02:01-B1*03:03L
  source 1..10: note = Severe acute respiratory syndrome coronavirus 2
ESGEFKLASH

SEQ ID NO: 24786 - protein, 12 aa, Severe acute respiratory syndrome-related coronavirus
  REGION 1..12: note = Table B: HLA-DQA1*03:01-B1*03:02L
  source 1..12: note = Severe acute respiratory syndrome coronavirus 2
EPSTQYEYGTED

SEQ ID NO: 24787 - protein, 14 aa, Severe acute respiratory syndrome-related coronavirus
  REGION 1..14: note = Table B: HLA-DQA1*03:01-B1*03:02L
  source 1..14: note = Severe acute respiratory syndrome coronavirus 2
PSTQYEYGTEDDYQ

SEQ ID NO: 24788 - protein, 10 aa, Severe acute respiratory syndrome-related coronavirus
  REGION 1..10: note = Table B: HLA-DQA1*03:01-B1*03:02L HLA-DQA1*01:03-B1*06:01L HLA-DQA1*02:01-B1*03:03L
  source 1..10: note = Severe acute respiratory syndrome coronavirus 2
DYQGKPLEFG

SEQ ID NO: 24789 - protein, 14 aa, Severe acute respiratory syndrome-related coronavirus
  REGION 1..14: note = Table B: HLA-DQA1*03:01-B1*03:02L
  source 1..14: note = Severe acute respiratory syndrome coronavirus 2
YQGKPLEFGATSAA

SEQ ID NO: 24790 - protein, 11 aa, Severe acute respiratory syndrome-related coronavirus
  REGION 1..11: note = Table B: HLA-DQA1*03:01-B1*03:02L HLA-DQA1*02:01-B1*03:03L
  source 1..11: note = Severe acute respiratory syndrome coronavirus 2
GATSAALQPEE

SEQ ID NO: 24791 - protein, 13 aa, Severe acute respiratory syndrome-related coronavirus
  REGION 1..13: note = Table B: HLA-DQA1*03:01-B1*03:02L HLA-DRB1*16:01L
  source 1..13: note = Severe acute respiratory syndrome coronavirus 2
EEQEEDWLDDDSQ

SEQ ID NO: 24792 - protein, 13 aa, Severe acute respiratory syndrome-related coronavirus
  REGION 1..13: note = Table B: HLA-DQA1*03:01-B1*03:02L
  source 1..13: note = Severe acute respiratory syndrome coronavirus 2
EQEEDWLDDDSQQ

SEQ ID NO: 24793 - protein, 11 aa, Severe acute respiratory syndrome-related coronavirus
  REGION 1..11: note = Table B: HLA-DQA1*03:01-B1*03:02L HLA-DQA1*02:01-B1*03:03L
  source 1..11: note = Severe acute respiratory syndrome coronavirus 2
DSQQTVGQQDG

SEQ ID NO: 24794 - protein, 12 aa, Severe acute respiratory syndrome-related coronavirus
  REGION 1..12: note = Table B: HLA-DQA1*03:01-B1*03:02L
  source 1..12: note = Severe acute respiratory syndrome coronavirus 2
SQQTVGQQDGSE

SEQ ID NO: 24795 - protein, 12 aa, Severe acute respiratory syndrome-related coronavirus
  REGION 1..12: note = Table B: HLA-DQA1*03:01-B1*03:02L
  source 1..12: note = Severe acute respiratory syndrome coronavirus 2
QTVGQQDGSEDN

SEQ ID NO: 24796 - protein, 13 aa, Severe acute respiratory syndrome-related coronavirus
  REGION 1..13: note = Table B: HLA-DQA1*03:01-B1*03:02L
  source 1..13: note = Severe acute respiratory syndrome coronavirus 2
DGSEDNQTTTIQT

SEQ ID NO: 24797 - protein, 10 aa, Severe acute respiratory syndrome-related coronavirus
  REGION 1..10: note = Table B: HLA-DQA1*03:01-B1*03:02L
  source 1..10: note = Severe acute respiratory syndrome coronavirus 2
IQTIVEVQPQ

SEQ ID NO: 24798 - protein, 10 aa, Severe acute respiratory syndrome-related coronavirus
  REGION 1..10: note = Table B: HLA-DQA1*03:01-B1*03:02L HLA-DQA1*01:03-B1*06:01L HLA-DQA1*02:01-B1*03:03L
  source 1..10: note = Severe acute respiratory syndrome coronavirus 2
ELTPVVQTIE

SEQ ID NO: 24799 - protein, 10 aa, Severe acute respiratory syndrome-related coronavirus
  REGION 1..10: note = Table B: HLA-DQA1*03:01-B1*03:02L
  source 1..10: note = Severe acute respiratory syndrome coronavirus 2
TPVVQTIEVN

SEQ ID NO: 24800 - protein, 10 aa, Severe acute respiratory syndrome-related coronavirus
  REGION 1..10: note = Table B: HLA-DQA1*03:01-B1*03:02L HLA-DQA1*02:01-B1*03:03L
  source 1..10: note = Severe acute respiratory syndrome coronavirus 2
KNADIVEEAK

SEQ ID NO: 24801 - protein, 10 aa, Severe acute respiratory syndrome-related coronavirus
  REGION 1..10: note = Table B: HLA-DQA1*03:01-B1*03:02L HLA-DQA1*02:01-B1*03:03L
  source 1..10: note = Severe acute respiratory syndrome coronavirus 2
NADIVEEAKK

SEQ ID NO: 24802 - protein, 10 aa, Severe acute respiratory syndrome-related coronavirus
  REGION 1..10: note = Table B: HLA-DQA1*03:01-B1*03:02L
  source 1..10: note = Severe acute respiratory syndrome coronavirus 2
DIVEEAKKVK

SEQ ID NO: 24803 - protein, 10 aa, Severe acute respiratory syndrome-related coronavirus
  REGION 1..10: note = Table B: HLA-DQA1*03:01-B1*03:02L
  source 1..10: note = Severe acute respiratory syndrome coronavirus 2
VEEAKKVKPT

SEQ ID NO: 24804 - protein, 11 aa, Severe acute respiratory syndrome-related coronavirus
  REGION 1..11: note = Table B: HLA-DQA1*03:01-B1*03:02L HLA-DQA1*02:01-B1*03:03L
  source 1..11: note = Severe acute respiratory syndrome coronavirus 2
AANVYLKHGGG

SEQ ID NO: 24805 - protein, 10 aa, Severe acute respiratory syndrome-related coronavirus
  REGION 1..10: note = Table B: HLA-DQA1*03:01-B1*03:02L HLA-DQA1*01:03-B1*06:01L HLA-DQA1*02:01-B1*03:03L
  source 1..10: note = Severe acute respiratory syndrome coronavirus 2
GVAGALNKAT

SEQ ID NO: 24806 - protein, 11 aa, Severe acute respiratory syndrome-related coronavirus
  REGION 1..11: note = Table B: HLA-DQA1*03:01-B1*03:02L HLA-DQA1*01:03-B1*06:01L HLA-DQA1*02:01-B1*03:03L
  source 1..11: note = Severe acute respiratory syndrome coronavirus 2
TNNAMQVESDD

SEQ ID NO: 24807 - protein, 13 aa, Severe acute respiratory syndrome-related coronavirus
  REGION 1..13: note = Table B: HLA-DQA1*03:01-B1*03:02L HLA-DRB1*16:01L
  source 1..13: note = Severe acute respiratory syndrome coronavirus 2
AMQVESDDYIATN

SEQ ID NO: 24808 - protein, 10 aa, Severe acute respiratory syndrome-related coronavirus
  REGION 1..10: note = Table B: HLA-DQA1*03:01-B1*03:02L HLA-DQA1*02:01-B1*03:03L
  source 1..10: note = Severe acute respiratory syndrome coronavirus 2
HVVGPNVNKG

SEQ ID NO: 24809 - protein, 10 aa, Severe acute respiratory syndrome-related coronavirus
  REGION 1..10: note = Table B: HLA-DQA1*03:01-B1*03:02L
  source 1..10: note = Severe acute respiratory syndrome coronavirus 2
VGPNVNKGED

SEQ ID NO: 24810 - protein, 10 aa, Severe acute respiratory syndrome-related coronavirus
  REGION 1..10: note = Table B: HLA-DQA1*03:01-B1*03:02L
  source 1..10: note = Severe acute respiratory syndrome coronavirus 2
PNVNKGEDIQ

SEQ ID NO: 24811 - protein, 11 aa, Severe acute respiratory syndrome-related coronavirus
  REGION 1..11: note = Table B: HLA-DQA1*03:01-B1*03:02L HLA-DQA1*01:03-B1*06:01L HLA-DQA1*02:01-B1*03:03L
  source 1..11: note = Severe acute respiratory syndrome coronavirus 2
LKSAYENFNQH

SEQ ID NO: 24812 - protein, 10 aa, Severe acute respiratory syndrome-related coronavirus
  REGION 1..10: note = Table B: HLA-DQA1*03:01-B1*03:02L HLA-DQA1*02:01-B1*03:03L
  source 1..10: note = Severe acute respiratory syndrome coronavirus 2
AGIFGADPIH

SEQ ID NO: 24813 - protein, 10 aa, Severe acute respiratory syndrome-related coronavirus
  REGION 1..10: note = Table B: HLA-DQA1*03:01-B1*03:02L HLA-DQA1*01:03-B1*06:01L HLA-DQA1*02:01-B1*03:03L
  source 1..10: note = Severe acute respiratory syndrome coronavirus 2
TNVYLAVFDK

SEQ ID NO: 24814 - protein, 10 aa, Severe acute respiratory syndrome-related coronavirus
  REGION 1..10: note = Table B: HLA-DQA1*03:01-B1*03:02L
  source 1..10: note = Severe acute respiratory syndrome coronavirus 2
MKSEKQVEQK

SEQ ID NO: 24815 - protein, 10 aa, Severe acute respiratory syndrome-related coronavirus
  REGION 1..10: note = Table B: HLA-DQA1*03:01-B1*03:02L
  source 1..10: note = Severe acute respiratory syndrome coronavirus 2
VEQKIAEIPK

SEQ ID NO: 24816 - protein, 10 aa, Severe acute respiratory syndrome-related coronavirus
  REGION 1..10: note = Table B: HLA-DQA1*03:01-B1*03:02L
  source 1..10: note = Severe acute respiratory syndrome coronavirus 2
QKIAEIPKEE

SEQ ID NO: 24817 - protein, 11 aa, Severe acute respiratory syndrome-related coronavirus
  REGION 1..11: note = Table B: HLA-DQA1*03:01-B1*03:02L
  source 1..11: note = Severe acute respiratory syndrome coronavirus 2
IPKEEVKPFIT

SEQ ID NO: 24818 - protein, 10 aa, Severe acute respiratory syndrome-related coronavirus
  REGION 1..10: note = Table B: HLA-DQA1*03:01-B1*03:02L
  source 1..10: note = Severe acute respiratory syndrome coronavirus 2
PSVEQRKQDD

SEQ ID NO: 24819 - protein, 11 aa, Severe acute respiratory syndrome-related coronavirus
  REGION 1..11: note = Table B: HLA-DQA1*03:01-B1*03:02L
  source 1..11: note = Severe acute respiratory syndrome coronavirus 2
INGNLHPDSAT

SEQ ID NO: 24820 - protein, 10 aa, Severe acute respiratory syndrome-related coronavirus
  REGION 1..10: note = Table B: HLA-DQA1*03:01-B1*03:02L HLA-DRB1*14:17L HLA-DQA1*02:01-B1*03:03L
  source 1..10: note = Severe acute respiratory syndrome coronavirus 2
AVVIPTKKAG

SEQ ID NO: 24821 - protein, 10 aa, Severe acute respiratory syndrome-related coronavirus
  REGION 1..10: note = Table B: HLA-DQA1*03:01-B1*03:02L HLA-DQA1*01:03-B1*06:01L HLA-DQA1*02:01-B1*03:03L
  source 1..10: note = Severe acute respiratory syndrome coronavirus 2
AGGTTEMLAK

SEQ ID NO: 24822 - protein, 10 aa, Severe acute respiratory syndrome-related coronavirus
  REGION 1..10: note = Table B: HLA-DQA1*03:01-B1*03:02L
  source 1..10: note = Severe acute respiratory syndrome coronavirus 2
GGTTEMLAKA

SEQ ID NO: 24823 - protein, 10 aa, Severe acute respiratory syndrome-related coronavirus
  REGION 1..10: note = Table B: HLA-DQA1*03:01-B1*03:02L HLA-DQA1*01:03-B1*06:01L HLA-DQA1*02:01-B1*03:03L
  source 1..10: note = Severe acute respiratory syndrome coronavirus 2
TTEMLAKALR

SEQ ID NO: 24824 - protein, 11 aa, Severe acute respiratory syndrome-related coronavirus
  REGION 1..11: note = Table B: HLA-DQA1*03:01-B1*03:02L
  source 1..11: note = Severe acute respiratory syndrome coronavirus 2
AKALRKVPTDN

SEQ ID NO: 24825 - protein, 12 aa, Severe acute respiratory syndrome-related coronavirus
  REGION 1..12: note = Table B: HLA-DQA1*03:01-B1*03:02L
  source 1..12: note = Severe acute respiratory syndrome coronavirus 2
ALRKVPTDNYIT

SEQ ID NO: 24826 - protein, 13 aa, Severe acute respiratory syndrome-related coronavirus
  REGION 1..13: note = Table B: HLA-DQA1*03:01-B1*03:02L
  source 1..13: note = Severe acute respiratory syndrome coronavirus 2
KVPTDNYITTYPG

SEQ ID NO: 24827 - protein, 10 aa, Severe acute respiratory syndrome-related coronavirus
  REGION 1..10: note = Table B: HLA-DQA1*03:01-B1*03:02L
  source 1..10: note = Severe acute respiratory syndrome coronavirus 2
LPSIISNEKQ

SEQ ID NO: 24828 - protein, 12 aa, Severe acute respiratory syndrome-related coronavirus
  REGION 1..12: note = Table B: HLA-DQA1*03:01-B1*03:02L HLA-DQA1*02:01-B1*03:03L
  source 1..12: note = Severe acute respiratory syndrome coronavirus 2
NLREMLAHAEET

SEQ ID NO: 24829 - protein, 10 aa, Severe acute respiratory syndrome-related coronavirus
  REGION 1..10: note = Table B: HLA-DQA1*03:01-B1*03:02L
  source 1..10: note = Severe acute respiratory syndrome coronavirus 2
MLAHAEETRK

SEQ ID NO: 24830 - protein, 10 aa, Severe acute respiratory syndrome-related coronavirus
  REGION 1..10: note = Table B: HLA-DQA1*03:01-B1*03:02L HLA-DQA1*01:03-B1*06:01L HLA-DQA1*02:01-B1*03:03L
  source 1..10: note = Severe acute respiratory syndrome coronavirus 2
LAHAEETRKL

SEQ ID NO: 24831 - protein, 10 aa, Severe acute respiratory syndrome-related coronavirus
  REGION 1..10: note = Table B: HLA-DQA1*03:01-B1*03:02L
  source 1..10: note = Severe acute respiratory syndrome coronavirus 2
KLMPVCVETK

SEQ ID NO: 24832 - protein, 10 aa, Severe acute respiratory syndrome-related coronavirus
  REGION 1..10: note = Table B: HLA-DQA1*03:01-B1*03:02L
  source 1..10: note = Severe acute respiratory syndrome coronavirus 2
KAIVSTIQRK

SEQ ID NO: 24833 - protein, 11 aa, Severe acute respiratory syndrome-related coronavirus
  REGION 1..11: note = Table B: HLA-DQA1*03:01-B1*03:02L HLA-DQA1*02:01-B1*03:03L
  source 1..11: note = Severe acute respiratory syndrome coronavirus 2
SKTTVASLINT

SEQ ID NO: 24834 - protein, 10 aa, Severe acute respiratory syndrome-related coronavirus
  REGION 1..10: note = Table B: HLA-DQA1*03:01-B1*03:02L HLA-DQA1*01:03-B1*06:01L HLA-DQA1*02:01-B1*03:03L
  source 1..10: note = Severe acute respiratory syndrome coronavirus 2
HGLNLEEAAR

SEQ ID NO: 24835 - protein, 11 aa, Severe acute respiratory syndrome-related coronavirus
  REGION 1..11: note = Table B: HLA-DQA1*03:01-B1*03:02L
  source 1..11: note = Severe acute respiratory syndrome coronavirus 2
GLNLEEAARYM

SEQ ID NO: 24836 - protein, 11 aa, Severe acute respiratory syndrome-related coronavirus
  REGION 1..11: note = Table B: HLA-DQA1*03:01-B1*03:02L
  source 1..11: note = Severe acute respiratory syndrome coronavirus 2
VPATVSVSSPD

SEQ ID NO: 24837 - protein, 13 aa, Severe acute respiratory syndrome-related coronavirus
  REGION 1..13: note = Table B: HLA-DQA1*03:01-B1*03:02L
  source 1..13: note = Severe acute respiratory syndrome coronavirus 2
PATVSVSSPDAVT

SEQ ID NO: 24838 - protein, 12 aa, Severe acute respiratory syndrome-related coronavirus
  REGION 1..12: note = Table B: HLA-DQA1*03:01-B1*03:02L
  source 1..12: note = Severe acute respiratory syndrome coronavirus 2
SVSSPDAVTAYN

SEQ ID NO: 24839 - protein, 12 aa, Severe acute respiratory syndrome-related coronavirus
  REGION 1..12: note = Table B: HLA-DQA1*03:01-B1*03:02L
  source 1..12: note = Severe acute respiratory syndrome coronavirus 2
VSSPDAVTAYNG

SEQ ID NO: 24840 - protein, 10 aa, Severe acute respiratory syndrome-related coronavirus
  REGION 1..10: note = Table B: HLA-DQA1*03:01-B1*03:02L HLA-DQA1*05:05-B1*03:01L HLA-DQA1*01:03-B1*06:01L HLA-DQA1*02:01-B1*03:03L
  source 1..10: note = Severe acute respiratory syndrome coronavirus 2
TSSSKTPEEH

SEQ ID NO: 24841 - protein, 12 aa, Severe acute respiratory syndrome-related coronavirus
  REGION 1..12: note = Table B: HLA-DQA1*03:01-B1*03:02L
  source 1..12: note = Severe acute respiratory syndrome coronavirus 2
SSKTPEEHFIET

SEQ ID NO: 24842 - protein, 11 aa, Severe acute respiratory syndrome-related coronavirus
  REGION 1..11: note = Table B: HLA-DQA1*03:01-B1*03:02L
  source 1..11: note = Severe acute respiratory syndrome coronavirus 2
GQSTQLGIEFL

SEQ ID NO: 24843 - protein, 10 aa, Severe acute respiratory syndrome-related coronavirus
  REGION 1..10: note = Table B: HLA-DQA1*03:01-B1*03:02L HLA-DQA1*05:05-B1*03:01L HLA-DQA1*01:03-B1*06:01L HLA-DQA1*02:01-B1*03:03L
  source 1..10: note = Severe acute respiratory syndrome coronavirus 2
STQLGIEFLK

SEQ ID NO: 24844 - protein, 10 aa, Severe acute respiratory syndrome-related coronavirus
  REGION 1..10: note = Table B: HLA-DQA1*03:01-B1*03:02L
  source 1..10: note = Severe acute respiratory syndrome coronavirus 2
TQLGIEFLKR

SEQ ID NO: 24845 - protein, 10 aa, Severe acute respiratory syndrome-related coronavirus
  REGION 1..10: note = Table B: HLA-DQA1*03:01-B1*03:02L HLA-DPA1*01:02-B1*04:01L
  source 1..10: note = Severe acute respiratory syndrome coronavirus 2
IEFLKRGDKS

SEQ ID NO: 24846 - protein, 13 aa, Severe acute respiratory syndrome-related coronavirus
  REGION 1..13: note = Table B: HLA-DQA1*03:01-B1*03:02L
  source 1..13: note = Severe acute respiratory syndrome coronavirus 2
RGDKSVYYTSNPT

SEQ ID NO: 24847 - protein, 11 aa, Severe acute respiratory syndrome-related coronavirus
  REGION 1..11: note = Table B: HLA-DQA1*03:01-B1*03:02L
  source 1..11: note = Severe acute respiratory syndrome coronavirus 2
TSNPTTFHLDG

SEQ ID NO: 24848 - protein, 11 aa, Severe acute respiratory syndrome-related coronavirus
  REGION 1..11: note = Table B: HLA-DQA1*03:01-B1*03:02L
  source 1..11: note = Severe acute respiratory syndrome coronavirus 2
HLDGEVITFDN

SEQ ID NO: 24849 - protein, 10 aa, Severe acute respiratory syndrome-related coronavirus
  REGION 1..10: note = Table B: HLA-DQA1*03:01-B1*03:02L
  source 1..10: note = Severe acute respiratory syndrome coronavirus 2
KVFTTVDNIN

SEQ ID NO: 24850 - protein, 10 aa, Severe acute respiratory syndrome-related coronavirus
  REGION 1..10: note = Table B: HLA-DQA1*03:01-B1*03:02L HLA-DQA1*01:03-B1*06:01L HLA-DQA1*02:01-B1*03:03L
  source 1..10: note = Severe acute respiratory syndrome coronavirus 2
DGADVTKIKP

SEQ ID NO: 24851 - protein, 10 aa, Severe acute respiratory syndrome-related coronavirus
  REGION 1..10: note = Table B: HLA-DQA1*03:01-B1*03:02L
  source 1..10: note = Severe acute respiratory syndrome coronavirus 2
GADVTKIKPH

SEQ ID NO: 24852 - protein, 10 aa, Severe acute respiratory syndrome-related coronavirus
  REGION 1..10: note = Table B: HLA-DQA1*03:01-B1*03:02L HLA-DQA1*02:01-B1*03:03L
  source 1..10: note = Severe acute respiratory syndrome coronavirus 2
ADVTKIKPHN

SEQ ID NO: 24853 - protein, 11 aa, Severe acute respiratory syndrome-related coronavirus
  REGION 1..11: note = Table B: HLA-DQA1*03:01-B1*03:02L HLA-DQA1*02:01-B1*03:03L
  source 1..11: note = Severe acute respiratory syndrome coronavirus 2
DVTKIKPHNSH

SEQ ID NO: 24854 - protein, 11 aa, Severe acute respiratory syndrome-related coronavirus
  REGION 1..11: note = Table B: HLA-DQA1*03:01-B1*03:02L
  source 1..11: note = Severe acute respiratory syndrome coronavirus 2
KIKPHNSHEGK

SEQ ID NO: 24855 - protein, 11 aa, Severe acute respiratory syndrome-related coronavirus
  REGION 1..11: note = Table B: HLA-DQA1*03:01-B1*03:02L
  source 1..11: note = Severe acute respiratory syndrome coronavirus 2
GKTFYVLPNDD

SEQ ID NO: 24856 - protein, 11 aa, Severe acute respiratory syndrome-related coronavirus
  REGION 1..11: note = Table B: HLA-DQA1*03:01-B1*03:02L
  source 1..11: note = Severe acute respiratory syndrome coronavirus 2
NPPALQDAYYR

SEQ ID NO: 24857 - protein, 11 aa, Severe acute respiratory syndrome-related coronavirus
  REGION 1..11: note = Table B: HLA-DQA1*03:01-B1*03:02L HLA-DRB1*16:01L HLA-DQA1*02:01-B1*03:03L
  source 1..11: note = Severe acute respiratory syndrome coronavirus 2
DAYYRARAGEA

SEQ ID NO: 24858 - protein, 11 aa, Severe acute respiratory syndrome-related coronavirus
  REGION 1..11: note = Table B: HLA-DQA1*03:01-B1*03:02L HLA-DRB1*16:01L
  source 1..11: note = Severe acute respiratory syndrome coronavirus 2
AYYRARAGEAA

SEQ ID NO: 24859 - protein, 11 aa, Severe acute respiratory syndrome-related coronavirus
  REGION 1..11: note = Table B: HLA-DQA1*03:01-B1*03:02L HLA-DQA1*02:01-B1*03:03L
  source 1..11: note = Severe acute respiratory syndrome coronavirus 2
PFVMMSAPPAQ

SEQ ID NO: 24860 - protein, 10 aa, Severe acute respiratory syndrome-related coronavirus
  REGION 1..10: note = Table B: HLA-DQA1*03:01-B1*03:02L
  source 1..10: note = Severe acute respiratory syndrome coronavirus 2
SAPPAQYELK

SEQ ID NO: 24861 - protein, 11 aa, Severe acute respiratory syndrome-related coronavirus
  REGION 1..11: note = Table B: HLA-DQA1*03:01-B1*03:02L
  source 1..11: note = Severe acute respiratory syndrome coronavirus 2
APPAQYELKHG

SEQ ID NO: 24862 - protein, 11 aa, Severe acute respiratory syndrome-related coronavirus
  REGION 1..11: note = Table B: HLA-DQA1*03:01-B1*03:02L
  source 1..11: note = Severe acute respiratory syndrome coronavirus 2
TKSSEYKGPIT

SEQ ID NO: 24863 - protein, 10 aa, Severe acute respiratory syndrome-related coronavirus
  REGION 1..10: note = Table B: HLA-DQA1*03:01-B1*03:02L HLA-DQA1*01:03-B1*06:01L HLA-DQA1*02:01-B1*03:03L
  source 1..10: note = Severe acute respiratory syndrome coronavirus 2
ENSYTTTIKP

SEQ ID NO: 24864 - protein, 11 aa, Severe acute respiratory syndrome-related coronavirus
  REGION 1..11: note = Table B: HLA-DQA1*03:01-B1*03:02L
  source 1..11: note = Severe acute respiratory syndrome coronavirus 2
TIKPVTYKLDG

SEQ ID NO: 24865 - protein, 11 aa, Severe acute respiratory syndrome-related coronavirus
  REGION 1..11: note = Table B: HLA-DQA1*03:01-B1*03:02L HLA-DQA1*02:01-B1*03:03L
  source 1..11: note = Severe acute respiratory syndrome coronavirus 2
DGVVCTEIDPK

SEQ ID NO: 24866 - protein, 11 aa, Severe acute respiratory syndrome-related coronavirus
  REGION 1..11: note = Table B: HLA-DQA1*03:01-B1*03:02L
  source 1..11: note = Severe acute respiratory syndrome coronavirus 2
PYPNASFDNFK

SEQ ID NO: 24867 - protein, 11 aa, Severe acute respiratory syndrome-related coronavirus
  REGION 1..11: note = Table B: HLA-DQA1*03:01-B1*03:02L
  source 1..11: note = Severe acute respiratory syndrome coronavirus 2
DNFKFVCDNIK

SEQ ID NO: 24868 - protein, 12 aa, Severe acute respiratory syndrome-related coronavirus
  REGION 1..12: note = Table B: HLA-DQA1*03:01-B1*03:02L
  source 1..12: note = Severe acute respiratory syndrome coronavirus 2
FADDLNQLTGYK

SEQ ID NO: 24869 - protein, 10 aa, Severe acute respiratory syndrome-related coronavirus
  REGION 1..10: note = Table B: HLA-DQA1*03:01-B1*03:02L
  source 1..10: note = Severe acute respiratory syndrome coronavirus 2
DLNQLTGYKK

SEQ ID NO: 24870 - protein, 10 aa, Severe acute respiratory syndrome-related coronavirus
  REGION 1..10: note = Table B: HLA-DQA1*03:01-B1*03:02L
  source 1..10: note = Severe acute respiratory syndrome coronavirus 2
DYKHYTPSFK

SEQ ID NO: 24871 - protein, 10 aa, Severe acute respiratory syndrome-related coronavirus
  REGION 1..10: note = Table B: HLA-DQA1*03:01-B1*03:02L
  source 1..10: note = Severe acute respiratory syndrome coronavirus 2
VWHVNNATNK

SEQ ID NO: 24872 - protein, 11 aa, Severe acute respiratory syndrome-related coronavirus
  REGION 1..11: note = Table B: HLA-DQA1*03:01-B1*03:02L
  source 1..11: note = Severe acute respiratory syndrome coronavirus 2
ATYKPNTWCIR

SEQ ID NO: 24873 - protein, 10 aa, Severe acute respiratory syndrome-related coronavirus
  REGION 1..10: note = Table B: HLA-DQA1*03:01-B1*03:02L HLA-DQA1*01:03-B1*06:01L HLA-DQA1*02:01-B1*03:03L
  source 1..10: note = Severe acute respiratory syndrome coronavirus 2
NSFDVLKSED

SEQ ID NO: 24874 - protein, 10 aa, Severe acute respiratory syndrome-related coronavirus
  REGION 1..10: note = Table B: HLA-DQA1*03:01-B1*03:02L HLA-DQA1*01:03-B1*06:01L HLA-DQA1*02:01-B1*03:03L
  source 1..10: note = Severe acute respiratory syndrome coronavirus 2
VGDIILKPAN

SEQ ID NO: 24875 - protein, 10 aa, Severe acute respiratory syndrome-related coronavirus
  REGION 1..10: note = Table B: HLA-DQA1*03:01-B1*03:02L
  source 1..10: note = Severe acute respiratory syndrome coronavirus 2
GDIILKPANN

SEQ ID NO: 24876 - protein, 10 aa, Severe acute respiratory syndrome-related coronavirus
  REGION 1..10: note = Table B: HLA-DQA1*03:01-B1*03:02L HLA-DQA1*01:03-B1*06:01L HLA-DQA1*02:01-B1*03:03L
  source 1..10: note = Severe acute respiratory syndrome coronavirus 2
NSLKITEEVG

SEQ ID NO: 24877 - protein, 11 aa, Severe acute respiratory syndrome-related coronavirus
  REGION 1..11: note = Table B: HLA-DQA1*03:01-B1*03:02L HLA-DQA1*01:03-B1*06:01L HLA-DQA1*02:01-B1*03:03L
  source 1..11: note = Severe acute respiratory syndrome coronavirus 2
VDNSSLTIKKP

SEQ ID NO: 24878 - protein, 10 aa, Severe acute respiratory syndrome-related coronavirus
  REGION 1..10: note = Table B: HLA-DQA1*03:01-B1*03:02L HLA-DQA1*02:01-B1*03:03L
  source 1..10: note = Severe acute respiratory syndrome coronavirus 2
SLTIKKPNEL

SEQ ID NO: 24879 - protein, 10 aa, Severe acute respiratory syndrome-related coronavirus
  REGION 1..10: note = Table B: HLA-DQA1*03:01-B1*03:02L
  source 1..10: note = Severe acute respiratory syndrome coronavirus 2
AAVNSVPWDT

SEQ ID NO: 24880 - protein, 11 aa, Severe acute respiratory syndrome-related coronavirus
  REGION 1..11: note = Table B: HLA-DQA1*03:01-B1*03:02L
  source 1..11: note = Severe acute respiratory syndrome coronavirus 2
VPWDTIANYAK

SEQ ID NO: 24881 - protein, 10 aa, Severe acute respiratory syndrome-related coronavirus
  REGION 1..10: note = Table B: HLA-DQA1*03:01-B1*03:02L
  source 1..10: note = Severe acute respiratory syndrome coronavirus 2
AKNTVKSVGK

SEQ ID NO: 24882 - protein, 10 aa, Severe acute respiratory syndrome-related coronavirus
  REGION 1..10: note = Table B: HLA-DQA1*03:01-B1*03:02L HLA-DQA1*02:01-B1*03:03L
  source 1..10: note = Severe acute respiratory syndrome coronavirus 2
MAPISAMVRM

SEQ ID NO: 24883 - protein, 11 aa, Severe acute respiratory syndrome-related coronavirus
  REGION 1..11: note = Table B: HLA-DQA1*03:01-B1*03:02L
  source 1..11: note = Severe acute respiratory syndrome coronavirus 2
RSFYVYANGGK

SEQ ID NO: 24884 - protein, 14 aa, Severe acute respiratory syndrome-related coronavirus
  REGION 1..14: note = Table B: HLA-DQA1*03:01-B1*03:02L
  source 1..14: note = Severe acute respiratory syndrome coronavirus 2
PINPTDQSSYIVDS

SEQ ID NO: 24885 - protein, 10 aa, Severe acute respiratory syndrome-related coronavirus
  REGION 1..10: note = Table B: HLA-DQA1*03:01-B1*03:02L
  source 1..10: note = Severe acute respiratory syndrome coronavirus 2
HLYFDKAGQK

SEQ ID NO: 24886 - protein, 10 aa, Severe acute respiratory syndrome-related coronavirus
  REGION 1..10: note = Table B: HLA-DQA1*03:01-B1*03:02L
  source 1..10: note = Severe acute respiratory syndrome coronavirus 2
DKAGQKTYER

SEQ ID NO: 24887 - protein, 10 aa, Severe acute respiratory syndrome-related coronavirus
  REGION 1..10: note = Table B: HLA-DQA1*03:01-B1*03:02L
  source 1..10: note = Severe acute respiratory syndrome coronavirus 2
GQKTYERHSL

SEQ ID NO: 24888 - protein, 10 aa, Severe acute respiratory syndrome-related coronavirus
  REGION 1..10: note = Table B: HLA-DQA1*03:01-B1*03:02L HLA-DRB1*16:01L
  source 1..10: note = Severe acute respiratory syndrome coronavirus 2
RHSLSHFVNL

SEQ ID NO: 24889 - protein, 10 aa, Severe acute respiratory syndrome-related coronavirus
  REGION 1..10: note = Table B: HLA-DQA1*03:01-B1*03:02L
  source 1..10: note = Severe acute respiratory syndrome coronavirus 2
SHFVNLDNLR

SEQ ID NO: 24890 - protein, 10 aa, Severe acute respiratory syndrome-related coronavirus
  REGION 1..10: note = Table B: HLA-DQA1*03:01-B1*03:02L
  source 1..10: note = Severe acute respiratory syndrome coronavirus 2
NNTKGSLPIN

SEQ ID NO: 24891 - protein, 11 aa, Severe acute respiratory syndrome-related coronavirus
  REGION 1..11: note = Table B: HLA-DQA1*03:01-B1*03:02L HLA-DQA1*02:01-B1*03:03L
  source 1..11: note = Severe acute respiratory syndrome coronavirus 2
LPINVIVFDGK

SEQ ID NO: 24892 - protein, 11 aa, Severe acute respiratory syndrome-related coronavirus
  REGION 1..11: note = Table B: HLA-DQA1*03:01-B1*03:02L
  source 1..11: note = Severe acute respiratory syndrome coronavirus 2
DQALVSDVGDS

SEQ ID NO: 24893 - protein, 11 aa, Severe acute respiratory syndrome-related coronavirus
  REGION 1..11: note = Table B: HLA-DQA1*03:01-B1*03:02L
  source 1..11: note = Severe acute respiratory syndrome coronavirus 2
DSAEVAVKMFD

SEQ ID NO: 24894 - protein, 10 aa, Severe acute respiratory syndrome-related coronavirus
  REGION 1..10: note = Table B: HLA-DQA1*03:01-B1*03:02L HLA-DQA1*01:03-B1*06:01L HLA-DQA1*02:01-B1*03:03L
  source 1..10: note = Severe acute respiratory syndrome coronavirus 2
TFNVPMEKLK

SEQ ID NO: 24895 - protein, 10 aa, Severe acute respiratory syndrome-related coronavirus
  REGION 1..10: note = Table B: HLA-DQA1*03:01-B1*03:02L
  source 1..10: note = Severe acute respiratory syndrome coronavirus 2
AARQGFVDSD

SEQ ID NO: 24896 - protein, 10 aa, Severe acute respiratory syndrome-related coronavirus
  REGION 1..10: note = Table B: HLA-DQA1*03:01-B1*03:02L
  source 1..10: note = Severe acute respiratory syndrome coronavirus 2
ETKDVVECLK

SEQ ID NO: 24897 - protein, 10 aa, Severe acute respiratory syndrome-related coronavirus
  REGION 1..10: note = Table B: HLA-DQA1*03:01-B1*03:02L
  source 1..10: note = Severe acute respiratory syndrome coronavirus 2
SHQSDIEVTG

SEQ ID NO: 24898 - protein, 10 aa, Severe acute respiratory syndrome-related coronavirus
  REGION 1..10: note = Table B: HLA-DQA1*03:01-B1*03:02L HLA-DQA1*02:01-B1*03:03L
  source 1..10: note = Severe acute respiratory syndrome coronavirus 2
NKVENMTPRD

SEQ ID NO: 24899 - protein, 10 aa, Severe acute respiratory syndrome-related coronavirus
  REGION 1..10: note = Table B: HLA-DQA1*03:01-B1*03:02L
  source 1..10: note = Severe acute respiratory syndrome coronavirus 2
KVENMTPRDL

SEQ ID NO: 24900 - protein, 10 aa, Severe acute respiratory syndrome-related coronavirus
  REGION 1..10: note = Table B: HLA-DQA1*03:01-B1*03:02L
  source 1..10: note = Severe acute respiratory syndrome coronavirus 2
ARHINAQVAK

SEQ ID NO: 24901 - protein, 10 aa, Severe acute respiratory syndrome-related coronavirus
  REGION 1..10: note = Table B: HLA-DQA1*03:01-B1*03:02L HLA-DQA1*02:01-B1*03:03L
  source 1..10: note = Severe acute respiratory syndrome coronavirus 2
HINAQVAKSH

SEQ ID NO: 24902 - protein, 10 aa, Severe acute respiratory syndrome-related coronavirus
  REGION 1..10: note = Table B: HLA-DQA1*03:01-B1*03:02L HLA-DQA1*05:05-B1*03:01L HLA-DQA1*01:03-B1*06:01L HLA-DQA1*02:01-B1*03:03L
  source 1..10: note = Severe acute respiratory syndrome coronavirus 2
DFMSLSEQLR

SEQ ID NO: 24903 - protein, 10 aa, Severe acute respiratory syndrome-related coronavirus
  REGION 1..10: note = Table B: HLA-DQA1*03:01-B1*03:02L
  source 1..10: note = Severe acute respiratory syndrome coronavirus 2
NVVTTKIALK

SEQ ID NO: 24904 - protein, 10 aa, Severe acute respiratory syndrome-related coronavirus
  REGION 1..10: note = Table B: HLA-DQA1*03:01-B1*03:02L
  source 1..10: note = Severe acute respiratory syndrome coronavirus 2
TTKIALKGGK

SEQ ID NO: 24905 - protein, 10 aa, Severe acute respiratory syndrome-related coronavirus
  REGION 1..10: note = Table B: HLA-DQA1*03:01-B1*03:02L
  source 1..10: note = Severe acute respiratory syndrome coronavirus 2
AIFYLITPVH

SEQ ID NO: 24906 - protein, 13 aa, Severe acute respiratory syndrome-related coronavirus
  REGION 1..13: note = Table B: HLA-DQA1*03:01-B1*03:02L HLA-DQA1*02:01-B1*03:03L
  source 1..13: note = Severe acute respiratory syndrome coronavirus 2
TDTCFANKHADFD

SEQ ID NO: 24907 - protein, 13 aa, Severe acute respiratory syndrome-related coronavirus
  REGION 1..13: note = Table B: HLA-DQA1*03:01-B1*03:02L
  source 1..13: note = Severe acute respiratory syndrome coronavirus 2
KHADFDTWFSQRG

SEQ ID NO: 24908 - protein, 11 aa, Severe acute respiratory syndrome-related coronavirus
  REGION 1..11: note = Table B: HLA-DQA1*03:01-B1*03:02L
  source 1..11: note = Severe acute respiratory syndrome coronavirus 2
SQRGGSYTNDK

SEQ ID NO: 24909 - protein, 12 aa, Severe acute respiratory syndrome-related coronavirus
  REGION 1..12: note = Table B: HLA-DQA1*03:01-B1*03:02L HLA-DQA1*02:01-B1*03:03L
  source 1..12: note = Severe acute respiratory syndrome coronavirus 2
TTNGDFLHFLPR

SEQ ID NO: 24910 - protein, 11 aa, Severe acute respiratory syndrome-related coronavirus
  REGION 1..11: note = Table B: HLA-DQA1*03:01-B1*03:02L HLA-DQA1*02:01-B1*03:03L
  source 1..11: note = Severe acute respiratory syndrome coronavirus 2
YDTNVLEGSVA

SEQ ID NO: 24911 - protein, 10 aa, Severe acute respiratory syndrome-related coronavirus
  REGION 1..10: note = Table B: HLA-DQA1*03:01-B1*03:02L HLA-DQA1*05:05-B1*03:01L HLA-DQA1*01:03-B1*06:01L HLA-DQA1*02:01-B1*03:03L
  source 1..10: note = Severe acute respiratory syndrome coronavirus 2
EGSVAYESLR

SEQ ID NO: 24912 - protein, 10 aa, Severe acute respiratory syndrome-related coronavirus
  REGION 1..10: note = Table B: HLA-DQA1*03:01-B1*03:02L
  source 1..10: note = Severe acute respiratory syndrome coronavirus 2
ESLRPDTRYV

SEQ ID NO: 24913 - protein, 11 aa, Severe acute respiratory syndrome-related coronavirus
  REGION 1..11: note = Table B: HLA-DQA1*03:01-B1*03:02L HLA-DQA1*01:03-B1*06:01L
  source 1..11: note = Severe acute respiratory syndrome coronavirus 2
EGSVRVVTTFD

SEQ ID NO: 24914 - protein, 10 aa, Severe acute respiratory syndrome-related coronavirus
  REGION 1..10: note = Table B: HLA-DQA1*03:01-B1*03:02L HLA-DPA1*01:02-B1*04:01L HLA-DRB1*16:01L HLA-DQA1*01:03-B1*06:01L HLA-DQA1*02:01-B1*03:03L
  source 1..10: note = Severe acute respiratory syndrome coronavirus 2
RAFGEYSHVV

SEQ ID NO: 24915 - protein, 10 aa, Severe acute respiratory syndrome-related coronavirus
  REGION 1..10: note = Table B: HLA-DQA1*03:01-B1*03:02L HLA-DPA1*01:02-B1*04:01L
  source 1..10: note = Severe acute respiratory syndrome coronavirus 2
RYLALYNKYK

SEQ ID NO: 24916 - protein, 10 aa, Severe acute respiratory syndrome-related coronavirus
  REGION 1..10: note = Table B: HLA-DQA1*03:01-B1*03:02L
  source 1..10: note = Severe acute respiratory syndrome coronavirus 2
LAKALNDFSN

SEQ ID NO: 24917 - protein, 10 aa, Severe acute respiratory syndrome-related coronavirus
  REGION 1..10: note = Table B: HLA-DQA1*03:01-B1*03:02L HLA-DQA1*01:03-B1*06:01L HLA-DQA1*02:01-B1*03:03L
  source 1..10: note = Severe acute respiratory syndrome coronavirus 2
SAVLQSGFRK

SEQ ID NO: 24918 - protein, 10 aa, Severe acute respiratory syndrome-related coronavirus
  REGION 1..10: note = Table B: HLA-DQA1*03:01-B1*03:02L
  source 1..10: note = Severe acute respiratory syndrome coronavirus 2
KMAFPSGKVE

SEQ ID NO: 24919 - protein, 10 aa, Severe acute respiratory syndrome-related coronavirus
  REGION 1..10: note = Table B: HLA-DQA1*03:01-B1*03:02L
  source 1..10: note = Severe acute respiratory syndrome coronavirus 2
PNYEDLLIRK

SEQ ID NO: 24920 - protein, 11 aa, Severe acute respiratory syndrome-related coronavirus
  REGION 1..11: note = Table B: HLA-DQA1*03:01-B1*03:02L HLA-DQA1*01:03-B1*06:01L HLA-DQA1*02:01-B1*03:03L
  source 1..11: note = Severe acute respiratory syndrome coronavirus 2
EDLLIRKSNHN

SEQ ID NO: 24921 - protein, 10 aa, Severe acute respiratory syndrome-related coronavirus
  REGION 1..10: note = Table B: HLA-DQA1*03:01-B1*03:02L HLA-DQA1*02:01-B1*03:03L
  source 1..10: note = Severe acute respiratory syndrome coronavirus 2
VQLRVIGHSM

SEQ ID NO: 24922 - protein, 10 aa, Severe acute respiratory syndrome-related coronavirus
  REGION 1..10: note = Table B: HLA-DQA1*03:01-B1*03:02L HLA-DRB1*14:17L
  source 1..10: note = Severe acute respiratory syndrome coronavirus 2
KLKVDTANPK

SEQ ID NO: 24923 - protein, 10 aa, Severe acute respiratory syndrome-related coronavirus
  REGION 1..10: note = Table B: HLA-DQA1*03:01-B1*03:02L
  source 1..10: note = Severe acute respiratory syndrome coronavirus 2
YMHHMELPTG

SEQ ID NO: 24924 - protein, 10 aa, Severe acute respiratory syndrome-related coronavirus
  REGION 1..10: note = Table B: HLA-DQA1*03:01-B1*03:02L
  source 1..10: note = Severe acute respiratory syndrome coronavirus 2
HHMELPTGVH

SEQ ID NO: 24925 - protein, 12 aa, Severe acute respiratory syndrome-related coronavirus
  REGION 1..12: note = Table B: HLA-DQA1*03:01-B1*03:02L
  source 1..12: note = Severe acute respiratory syndrome coronavirus 2
QAAGTDTTITVN

SEQ ID NO: 24926 - protein, 11 aa, Severe acute respiratory syndrome-related coronavirus
  REGION 1..11: note = Table B: HLA-DQA1*03:01-B1*03:02L HLA-DPA1*01:02-B1*04:01L HLA-DQA1*02:01-B1*03:03L
  source 1..11: note = Severe acute respiratory syndrome coronavirus 2
VINGDRWFLNR

SEQ ID NO: 24927 - protein, 11 aa, Severe acute respiratory syndrome-related coronavirus
  REGION 1..11: note = Table B: HLA-DQA1*03:01-B1*03:02L
  source 1..11: note = Severe acute respiratory syndrome coronavirus 2
NDFNLVAMKYN

SEQ ID NO: 24928 - protein, 10 aa, Severe acute respiratory syndrome-related coronavirus
  REGION 1..10: note = Table B: HLA-DQA1*03:01-B1*03:02L
  source 1..10: note = Severe acute respiratory syndrome coronavirus 2
DHVDILGPLS

SEQ ID NO: 24929 - protein, 11 aa, Severe acute respiratory syndrome-related coronavirus
  REGION 1..11: note = Table B: HLA-DQA1*03:01-B1*03:02L HLA-DQA1*02:01-B1*03:03L
  source 1..11: note = Severe acute respiratory syndrome coronavirus 2
DILGPLSAQTG

SEQ ID NO: 24930 - protein, 10 aa, Severe acute respiratory syndrome-related coronavirus
  REGION 1..10: note = Table B: HLA-DQA1*03:01-B1*03:02L HLA-DRB1*16:01L HLA-DQA1*02:01-B1*03:03L
  source 1..10: note = Severe acute respiratory syndrome coronavirus 2
VTFQSAVKRT

SEQ ID NO: 24931 - protein, 11 aa, Severe acute respiratory syndrome-related coronavirus
  REGION 1..11: note = Table B: HLA-DQA1*03:01-B1*03:02L HLA-DQA1*02:01-B1*03:03L
  source 1..11: note = Severe acute respiratory syndrome coronavirus 2
SAFAMMFVKHK

SEQ ID NO: 24932 - protein, 10 aa, Severe acute respiratory syndrome-related coronavirus
  REGION 1..10: note = Table B: HLA-DQA1*03:01-B1*03:02L
  source 1..10: note = Severe acute respiratory syndrome coronavirus 2
ARTVYDDGAR

SEQ ID NO: 24933 - protein, 10 aa, Severe acute respiratory syndrome-related coronavirus
  REGION 1..10: note = Table B: HLA-DQA1*03:01-B1*03:02L HLA-DQA1*01:03-B1*06:01L HLA-DQA1*02:01-B1*03:03L
  source 1..10: note = Severe acute respiratory syndrome coronavirus 2
DYLVSTQEFR

SEQ ID NO: 24934 - protein, 11 aa, Severe acute respiratory syndrome-related coronavirus
  REGION 1..11: note = Table B: HLA-DQA1*03:01-B1*03:02L
  source 1..11: note = Severe acute respiratory syndrome coronavirus 2
LPPKNSIDAFK

SEQ ID NO: 24935 - protein, 10 aa, Severe acute respiratory syndrome-related coronavirus
  REGION 1..10: note = Table B: HLA-DQA1*03:01-B1*03:02L HLA-DPA1*01:02-B1*04:01L
  source 1..10: note = Severe acute respiratory syndrome coronavirus 2
SIDAFKLNIK

SEQ ID NO: 24936 - protein, 11 aa, Severe acute respiratory syndrome-related coronavirus
  REGION 1..11: note = Table B: HLA-DQA1*03:01-B1*03:02L
  source 1..11: note = Severe acute respiratory syndrome coronavirus 2
NIKLLGVGGKP

SEQ ID NO: 24937 - protein, 10 aa, Severe acute respiratory syndrome-related coronavirus
  REGION 1..10: note = Table B: HLA-DQA1*03:01-B1*03:02L HLA-DQA1*01:03-B1*06:01L
  source 1..10: note = Severe acute respiratory syndrome coronavirus 2
VLLSVLQQLR

SEQ ID NO: 24938 - protein, 10 aa, Severe acute respiratory syndrome-related coronavirus
  REGION 1..10: note = Table B: HLA-DQA1*03:01-B1*03:02L
  source 1..10: note = Severe acute respiratory syndrome coronavirus 2
QQLRVESSSK

SEQ ID NO: 24939 - protein, 10 aa, Severe acute respiratory syndrome-related coronavirus
  REGION 1..10: note = Table B: HLA-DQA1*03:01-B1*03:02L
  source 1..10: note = Severe acute respiratory syndrome coronavirus 2
QLRVESSSKL

SEQ ID NO: 24940 - protein, 10 aa, Severe acute respiratory syndrome-related coronavirus
  REGION 1..10: note = Table B: HLA-DQA1*03:01-B1*03:02L
  source 1..10: note = Severe acute respiratory syndrome coronavirus 2
QLHNDILLAK

SEQ ID NO: 24941 - protein, 10 aa, Severe acute respiratory syndrome-related coronavirus
  REGION 1..10: note = Table B: HLA-DQA1*03:01-B1*03:02L
  source 1..10: note = Severe acute respiratory syndrome coronavirus 2
AKDTTEAFEK

SEQ ID NO: 24942 - protein, 10 aa, Severe acute respiratory syndrome-related coronavirus
  REGION 1..10: note = Table B: HLA-DQA1*03:01-B1*03:02L
  source 1..10: note = Severe acute respiratory syndrome coronavirus 2
KLCEEMLDNR

SEQ ID NO: 24943 - protein, 11 aa, Severe acute respiratory syndrome-related coronavirus
  REGION 1..11: note = Table B: HLA-DQA1*03:01-B1*03:02L HLA-DQA1*01:03-B1*06:01L HLA-DQA1*02:01-B1*03:03L
  source 1..11: note = Severe acute respiratory syndrome coronavirus 2
DNRATLQAIAS

SEQ ID NO: 24944 - protein, 10 aa, Severe acute respiratory syndrome-related coronavirus
  REGION 1..10: note = Table B: HLA-DQA1*03:01-B1*03:02L HLA-DQA1*01:03-B1*06:01L HLA-DQA1*02:01-B1*03:03L
  source 1..10: note = Severe acute respiratory syndrome coronavirus 2
ATAQEAYEQA

SEQ ID NO: 24945 - protein, 10 aa, Severe acute respiratory syndrome-related coronavirus
  REGION 1..10: note = Table B: HLA-DQA1*03:01-B1*03:02L HLA-DQA1*02:01-B1*03:03L
  source 1..10: note = Severe acute respiratory syndrome coronavirus 2
NGDSEVVLKK

SEQ ID NO: 24946 - protein, 10 aa, Severe acute respiratory syndrome-related coronavirus
  REGION 1..10: note = Table B: HLA-DQA1*03:01-B1*03:02L
  source 1..10: note = Severe acute respiratory syndrome coronavirus 2
DSEVVLKKLK

SEQ ID NO: 24947 - protein, 10 aa, Severe acute respiratory syndrome-related coronavirus
  REGION 1..10: note = Table B: HLA-DQA1*03:01-B1*03:02L
  source 1..10: note = Severe acute respiratory syndrome coronavirus 2
KLKKSLNVAK

SEQ ID NO: 24948 - protein, 10 aa, Severe acute respiratory syndrome-related coronavirus
  REGION 1..10: note = Table B: HLA-DQA1*03:01-B1*03:02L HLA-DQA1*02:01-B1*03:03L
  source 1..10: note = Severe acute respiratory syndrome coronavirus 2
SLNVAKSEFD

SEQ ID NO: 24949 - protein, 10 aa, Severe acute respiratory syndrome-related coronavirus
  REGION 1..10: note = Table B: HLA-DQA1*03:01-B1*03:02L HLA-DQA1*01:03-B1*06:01L HLA-DQA1*02:01-B1*03:03L
  source 1..10: note = Severe acute respiratory syndrome coronavirus 2
NVAKSEFDRD

SEQ ID NO: 24950 - protein, 11 aa, Severe acute respiratory syndrome-related coronavirus
  REGION 1..11: note = Table B: HLA-DQA1*03:01-B1*03:02L
  source 1..11: note = Severe acute respiratory syndrome coronavirus 2
MADQAMTQMYK

SEQ ID NO: 24951 - protein, 10 aa, Severe acute respiratory syndrome-related coronavirus
  REGION 1..10: note = Table B: HLA-DQA1*03:01-B1*03:02L
  source 1..10: note = Severe acute respiratory syndrome coronavirus 2
AMTQMYKQAR

SEQ ID NO: 24952 - protein, 11 aa, Severe acute respiratory syndrome-related coronavirus
  REGION 1..11: note = Table B: HLA-DQA1*03:01-B1*03:02L HLA-DQA1*02:01-B1*03:03L
  source 1..11: note = Severe acute respiratory syndrome coronavirus 2
DKRAKVTSAMQ

SEQ ID NO: 24953 - protein, 10 aa, Severe acute respiratory syndrome-related coronavirus
  REGION 1..10: note = Table B: HLA-DQA1*03:01-B1*03:02L
  source 1..10: note = Severe acute respiratory syndrome coronavirus 2
QTMLFTMLRK

SEQ ID NO: 24954 - protein, 10 aa, Severe acute respiratory syndrome-related coronavirus
  REGION 1..10: note = Table B: HLA-DQA1*03:01-B1*03:02L
  source 1..10: note = Severe acute respiratory syndrome coronavirus 2
NDALNNIINN

SEQ ID NO: 24955 - protein, 11 aa, Severe acute respiratory syndrome-related coronavirus
  REGION 1..11: note = Table B: HLA-DQA1*03:01-B1*03:02L
  source 1..11: note = Severe acute respiratory syndrome coronavirus 2
SALWEIQQVVD

SEQ ID NO: 24956 - protein, 11 aa, Severe acute respiratory syndrome-related coronavirus
  REGION 1..11: note = Table B: HLA-DQA1*03:01-B1*03:02L HLA-DQA1*01:03-B1*06:01L HLA-DQA1*02:01-B1*03:03L
  source 1..11: note = Severe acute respiratory syndrome coronavirus 2
DADSKIVQLSE

SEQ ID NO: 24957 - protein, 10 aa, Severe acute respiratory syndrome-related coronavirus
  REGION 1..10: note = Table B: HLA-DQA1*03:01-B1*03:02L
  source 1..10: note = Severe acute respiratory syndrome coronavirus 2
AWPLIVTALR

SEQ ID NO: 24958 - protein, 11 aa, Severe acute respiratory syndrome-related coronavirus
  REGION 1..11: note = Table B: HLA-DQA1*03:01-B1*03:02L
  source 1..11: note = Severe acute respiratory syndrome coronavirus 2
KLQNNELSPVA

SEQ ID NO: 24959 - protein, 10 aa, Severe acute respiratory syndrome-related coronavirus
  REGION 1..10: note = Table B: HLA-DQA1*03:01-B1*03:02L HLA-DQA1*02:01-B1*03:03L
  source 1..10: note = Severe acute respiratory syndrome coronavirus 2
NNELSPVALR

SEQ ID NO: 24960 - protein, 14 aa, Severe acute respiratory syndrome-related coronavirus
  REGION 1..14: note = Table B: HLA-DQA1*03:01-B1*03:02L
  source 1..14: note = Severe acute respiratory syndrome coronavirus 2
GTTQTACTDDNALA

SEQ ID NO: 24961 - protein, 12 aa, Severe acute respiratory syndrome-related coronavirus
  REGION 1..12: note = Table B: HLA-DQA1*03:01-B1*03:02L
  source 1..12: note = Severe acute respiratory syndrome coronavirus 2
FPKSDGTGTIYT

SEQ ID NO: 24962 - protein, 10 aa, Severe acute respiratory syndrome-related coronavirus
  REGION 1..10: note = Table B: HLA-DQA1*03:01-B1*03:02L
  source 1..10: note = Severe acute respiratory syndrome coronavirus 2
TDTPKGPKVK

SEQ ID NO: 24963 - protein, 10 aa, Severe acute respiratory syndrome-related coronavirus
  REGION 1..10: note = Table B: HLA-DQA1*03:01-B1*03:02L HLA-DQA1*01:03-B1*06:01L HLA-DQA1*02:01-B1*03:03L
  source 1..10: note = Severe acute respiratory syndrome coronavirus 2
GSLAATVRLQ

SEQ ID NO: 24964 - protein, 10 aa, Severe acute respiratory syndrome-related coronavirus
  REGION 1..10: note = Table B: HLA-DQA1*03:01-B1*03:02L
  source 1..10: note = Severe acute respiratory syndrome coronavirus 2
AGNATEVPAN

SEQ ID NO: 24965 - protein, 11 aa, Severe acute respiratory syndrome-related coronavirus
  REGION 1..11: note = Table B: HLA-DQA1*03:01-B1*03:02L
  source 1..11: note = Severe acute respiratory syndrome coronavirus 2
GNATEVPANST

SEQ ID NO: 24966 - protein, 10 aa, Severe acute respiratory syndrome-related coronavirus
  REGION 1..10: note = Table B: HLA-DQA1*03:01-B1*03:02L
  source 1..10: note = Severe acute respiratory syndrome coronavirus 2
GGQPITNCVK

SEQ ID NO: 24967 - protein, 10 aa, Severe acute respiratory syndrome-related coronavirus
  REGION 1..10: note = Table B: HLA-DQA1*03:01-B1*03:02L
  source 1..10: note = Severe acute respiratory syndrome coronavirus 2
TVTPEANMDQ

SEQ ID NO: 24968 - protein, 11 aa, Severe acute respiratory syndrome-related coronavirus
  REGION 1..11: note = Table B: HLA-DQA1*03:01-B1*03:02L
  source 1..11: note = Severe acute respiratory syndrome coronavirus 2
REPMLQSADAQ

SEQ ID NO: 24969 - protein, 10 aa, Severe acute respiratory syndrome-related coronavirus
  REGION 1..10: note = Table B: HLA-DQA1*03:01-B1*03:02L HLA-DQA1*01:03-B1*06:01L HLA-DQA1*02:01-B1*03:03L
  source 1..10: note = Severe acute respiratory syndrome coronavirus 2
STDVVYRAFD

SEQ ID NO: 24970 - protein, 10 aa, Severe acute respiratory syndrome-related coronavirus
  REGION 1..10: note = Table B: HLA-DQA1*03:01-B1*03:02L
  source 1..10: note = Severe acute respiratory syndrome coronavirus 2
YRAFDIYNDK

SEQ ID NO: 24971 - protein, 10 aa, Severe acute respiratory syndrome-related coronavirus
  REGION 1..10: note = Table B: HLA-DQA1*03:01-B1*03:02L
  source 1..10: note = Severe acute respiratory syndrome coronavirus 2
YNDKVAGFAK

SEQ ID NO: 24972 - protein, 10 aa, Severe acute respiratory syndrome-related coronavirus
  REGION 1..10: note = Table B: HLA-DQA1*03:01-B1*03:02L
  source 1..10: note = Severe acute respiratory syndrome coronavirus 2
RFQEKDEDDN

SEQ ID NO: 24973 - protein, 10 aa, Severe acute respiratory syndrome-related coronavirus
  REGION 1..10: note = Table B: HLA-DQA1*03:01-B1*03:02L HLA-DPA1*01:02-B1*04:01L
  source 1..10: note = Severe acute respiratory syndrome coronavirus 2
LIDSYFVVKR

SEQ ID NO: 24974 - protein, 10 aa, Severe acute respiratory syndrome-related coronavirus
  REGION 1..10: note = Table B: HLA-DQA1*03:01-B1*03:02L HLA-DPA1*01:02-B1*04:01L HLA-DQA1*01:03-B1*06:01L HLA-DQA1*02:01-B1*03:03L
  source 1..10: note = Severe acute respiratory syndrome coronavirus 2
DSYFVVKRHT

SEQ ID NO: 24975 - protein, 10 aa, Severe acute respiratory syndrome-related coronavirus
  REGION 1..10: note = Table B: HLA-DQA1*03:01-B1*03:02L HLA-DQA1*01:03-B1*06:01L HLA-DQA1*02:01-B1*03:03L
  source 1..10: note = Severe acute respiratory syndrome coronavirus 2
HTFSNYQHEE

SEQ ID NO: 24976 - protein, 10 aa, Severe acute respiratory syndrome-related coronavirus
  REGION 1..10: note = Table B: HLA-DQA1*03:01-B1*03:02L HLA-DQA1*02:01-B1*03:03L
  source 1..10: note = Severe acute respiratory syndrome coronavirus 2
DGDMVPHISR

SEQ ID NO: 24977 - protein, 10 aa, Severe acute respiratory syndrome-related coronavirus
  REGION 1..10: note = Table B: HLA-DQA1*03:01-B1*03:02L HLA-DQA1*02:01-B1*03:03L
  source 1..10: note = Severe acute respiratory syndrome coronavirus 2
MVPHISRQRL

SEQ ID NO: 24978 - protein, 10 aa, Severe acute respiratory syndrome-related coronavirus
  REGION 1..10: note = Table B: HLA-DQA1*03:01-B1*03:02L HLA-DQA1*02:01-B1*03:03L
  source 1..10: note = Severe acute respiratory syndrome coronavirus 2
RALTAESHVD

SEQ ID NO: 24979 - protein, 10 aa, Severe acute respiratory syndrome-related coronavirus
  REGION 1..10: note = Table B: HLA-DQA1*03:01-B1*03:02L
  source 1..10: note = Severe acute respiratory syndrome coronavirus 2
DTDLTKPYIK

SEQ ID NO: 24980 - protein, 11 aa, Severe acute respiratory syndrome-related coronavirus
  REGION 1..11: note = Table B: HLA-DQA1*03:01-B1*03:02L
  source 1..11: note = Severe acute respiratory syndrome coronavirus 2
DLLKYDFTEER

SEQ ID NO: 24981 - protein, 11 aa, Severe acute respiratory syndrome-related coronavirus
  REGION 1..11: note = Table B: HLA-DQA1*03:01-B1*03:02L
  source 1..11: note = Severe acute respiratory syndrome coronavirus 2
FTEERLKLFDR

SEQ ID NO: 24982 - protein, 10 aa, Severe acute respiratory syndrome-related coronavirus
  REGION 1..10: note = Table B: HLA-DQA1*03:01-B1*03:02L
  source 1..10: note = Severe acute respiratory syndrome coronavirus 2
PPTSFGPLVR

SEQ ID NO: 24983 - protein, 11 aa, Severe acute respiratory syndrome-related coronavirus
  REGION 1..11: note = Table B: HLA-DQA1*03:01-B1*03:02L
  source 1..11: note = Severe acute respiratory syndrome coronavirus 2
GPLVRKIFVDG

SEQ ID NO: 24984 - protein, 10 aa, Severe acute respiratory syndrome-related coronavirus
  REGION 1..10: note = Table B: HLA-DQA1*03:01-B1*03:02L
  source 1..10: note = Severe acute respiratory syndrome coronavirus 2
QDVNLHSSRL

SEQ ID NO: 24985 - protein, 10 aa, Severe acute respiratory syndrome-related coronavirus
  REGION 1..10: note = Table B: HLA-DQA1*03:01-B1*03:02L
  source 1..10: note = Severe acute respiratory syndrome coronavirus 2
DVNLHSSRLS

SEQ ID NO: 24986 - protein, 11 aa, Severe acute respiratory syndrome-related coronavirus
  REGION 1..11: note = Table B: HLA-DQA1*03:01-B1*03:02L
  source 1..11: note = Severe acute respiratory syndrome coronavirus 2
ADPAMHAASGN

SEQ ID NO: 24987 - protein, 10 aa, Severe acute respiratory syndrome-related coronavirus
  REGION 1..10: note = Table B: HLA-DQA1*03:01-B1*03:02L HLA-DQA1*01:03-B1*06:01L HLA-DQA1*02:01-B1*03:03L
  source 1..10: note = Severe acute respiratory syndrome coronavirus 2
ASGNLLLDKR

SEQ ID NO: 24988 - protein, 11 aa, Severe acute respiratory syndrome-related coronavirus
  REGION 1..11: note = Table B: HLA-DQA1*03:01-B1*03:02L HLA-DQA1*01:03-B1*06:01L HLA-DQA1*02:01-B1*03:03L
  source 1..11: note = Severe acute respiratory syndrome coronavirus 2
SGNLLLDKRTT

SEQ ID NO: 24989 - protein, 10 aa, Severe acute respiratory syndrome-related coronavirus
  REGION 1..10: note = Table B: HLA-DQA1*03:01-B1*03:02L HLA-DRB1*16:01L HLA-DQA1*02:01-B1*03:03L
  source 1..10: note = Severe acute respiratory syndrome coronavirus 2
TVKPGNFNKD

SEQ ID NO: 24990 - protein, 12 aa, Severe acute respiratory syndrome-related coronavirus
  REGION 1..12: note = Table B: HLA-DQA1*03:01-B1*03:02L
  source 1..12: note = Severe acute respiratory syndrome coronavirus 2
VKPGNFNKDFYD

SEQ ID NO: 24991 - protein, 10 aa, Severe acute respiratory syndrome-related coronavirus
  REGION 1..10: note = Table B: HLA-DQA1*03:01-B1*03:02L HLA-DQA1*02:01-B1*03:03L
  source 1..10: note = Severe acute respiratory syndrome coronavirus 2
DFAVSKGFFK

SEQ ID NO: 24992 - protein, 10 aa, Severe acute respiratory syndrome-related coronavirus
  REGION 1..10: note = Table B: HLA-DQA1*03:01-B1*03:02L HLA-DQA1*02:01-B1*03:03L
  source 1..10: note = Severe acute respiratory syndrome coronavirus 2
AVSKGFFKEG

SEQ ID NO: 24993 - protein, 10 aa, Severe acute respiratory syndrome-related coronavirus
  REGION 1..10: note = Table B: HLA-DQA1*03:01-B1*03:02L HLA-DQA1*02:01-B1*03:03L
  source 1..10: note = Severe acute respiratory syndrome coronavirus 2
FKEGSSVELK

SEQ ID NO: 24994 - protein, 10 aa, Severe acute respiratory syndrome-related coronavirus
  REGION 1..10: note = Table B: HLA-DQA1*03:01-B1*03:02L
  source 1..10: note = Severe acute respiratory syndrome coronavirus 2
ANQVIVNNLD

SEQ ID NO: 24995 - protein, 10 aa, Severe acute respiratory syndrome-related coronavirus
  REGION 1..10: note = Table B: HLA-DQA1*03:01-B1*03:02L HLA-DQA1*02:01-B1*03:03L
  source 1..10: note = Severe acute respiratory syndrome coronavirus 2
DKSAGFPFNK

SEQ ID NO: 24996 - protein, 12 aa, Severe acute respiratory syndrome-related coronavirus
  REGION 1..12: note = Table B: HLA-DQA1*03:01-B1*03:02L
  source 1..12: note = Severe acute respiratory syndrome coronavirus 2
YYDSMSYEDQDA

SEQ ID NO: 24997 - protein, 10 aa, Severe acute respiratory syndrome-related coronavirus
  REGION 1..10: note = Table B: HLA-DQA1*03:01-B1*03:02L
  source 1..10: note = Severe acute respiratory syndrome coronavirus 2
DQDALFAYTK

SEQ ID NO: 24998 - protein, 11 aa, Severe acute respiratory syndrome-related coronavirus
  REGION 1..11: note = Table B: HLA-DQA1*03:01-B1*03:02L HLA-DQA1*02:01-B1*03:03L
  source 1..11: note = Severe acute respiratory syndrome coronavirus 2
TKRNVIPTITQ

SEQ ID NO: 24999 - protein, 10 aa, Severe acute respiratory syndrome-related coronavirus
  REGION 1..10: note = Table B: HLA-DQA1*03:01-B1*03:02L HLA-DQA1*01:03-B1*06:01L
  source 1..10: note = Severe acute respiratory syndrome coronavirus 2
NVIPTITQMN

SEQ ID NO: 25000 - protein, 10 aa, Severe acute respiratory syndrome-related coronavirus
  REGION 1..10: note = Table B: HLA-DQA1*03:01-B1*03:02L
  source 1..10: note = Severe acute respiratory syndrome coronavirus 2
IPTITQMNLK

SEQ ID NO: 25001 - protein, 10 aa, Severe acute respiratory syndrome-related coronavirus
  REGION 1..10: note = Table B: HLA-DQA1*03:01-B1*03:02L
  source 1..10: note = Severe acute respiratory syndrome coronavirus 2
KLLKSIAATR

SEQ ID NO: 25002 - protein, 11 aa, Severe acute respiratory syndrome-related coronavirus
  REGION 1..11: note = Table B: HLA-DQA1*03:01-B1*03:02L HLA-DRB1*16:01L
  source 1..11: note = Severe acute respiratory syndrome coronavirus 2
VVIGTSKFYGG

SEQ ID NO: 25003 - protein, 11 aa, Severe acute respiratory syndrome-related coronavirus
  REGION 1..11: note = Table B: HLA-DQA1*03:01-B1*03:02L
  source 1..11: note = Severe acute respiratory syndrome coronavirus 2
KFYGGWHNMLK

SEQ ID NO: 25004 - protein, 10 aa, Severe acute respiratory syndrome-related coronavirus
  REGION 1..10: note = Table B: HLA-DQA1*03:01-B1*03:02L HLA-DQA1*01:03-B1*06:01L HLA-DQA1*02:01-B1*03:03L
  source 1..10: note = Severe acute respiratory syndrome coronavirus 2
IMASLVLARK

SEQ ID NO: 25005 - protein, 11 aa, Severe acute respiratory syndrome-related coronavirus
  REGION 1..11: note = Table B: HLA-DQA1*03:01-B1*03:02L
  source 1..11: note = Severe acute respiratory syndrome coronavirus 2
GGSLYVKPGGT

SEQ ID NO: 25006 - protein, 12 aa, Severe acute respiratory syndrome-related coronavirus
  REGION 1..12: note = Table B: HLA-DQA1*03:01-B1*03:02L
  source 1..12: note = Severe acute respiratory syndrome coronavirus 2
YVKPGGTSSGDA

SEQ ID NO: 25007 - protein, 14 aa, Severe acute respiratory syndrome-related coronavirus
  REGION 1..14: note = Table B: HLA-DQA1*03:01-B1*03:02L HLA-DQA1*05:05-B1*03:01L
  source 1..14: note = Severe acute respiratory syndrome coronavirus 2
KPGGTSSGDATTAY

SEQ ID NO: 25008 - protein, 12 aa, Severe acute respiratory syndrome-related coronavirus
  REGION 1..12: note = Table B: HLA-DQA1*03:01-B1*03:02L
  source 1..12: note = Severe acute respiratory syndrome coronavirus 2
SGDATTAYANSV

SEQ ID NO: 25009 - protein, 11 aa, Severe acute respiratory syndrome-related coronavirus
  REGION 1..11: note = Table B: HLA-DQA1*03:01-B1*03:02L
  source 1..11: note = Severe acute respiratory syndrome coronavirus 2
DGNKIADKYVR

SEQ ID NO: 25010 - protein, 10 aa, Severe acute respiratory syndrome-related coronavirus
  REGION 1..10: note = Table B: HLA-DQA1*03:01-B1*03:02L HLA-DRB1*16:01L HLA-DQA1*02:01-B1*03:03L
  source 1..10: note = Severe acute respiratory syndrome coronavirus 2
KIADKYVRNL

SEQ ID NO: 25011 - protein, 11 aa, Severe acute respiratory syndrome-related coronavirus
  REGION 1..11: note = Table B: HLA-DQA1*03:01-B1*03:02L
  source 1..11: note = Severe acute respiratory syndrome coronavirus 2
RNRDVDTDFVN

SEQ ID NO: 25012 - protein, 11 aa, Severe acute respiratory syndrome-related coronavirus
  REGION 1..11: note = Table B: HLA-DQA1*03:01-B1*03:02L
  source 1..11: note = Severe acute respiratory syndrome coronavirus 2
NRDVDTDFVNE

SEQ ID NO: 25013 - protein, 12 aa, Severe acute respiratory syndrome-related coronavirus
  REGION 1..12: note = Table B: HLA-DQA1*03:01-B1*03:02L
  source 1..12: note = Severe acute respiratory syndrome coronavirus 2
DVDTDFVNEFYA

SEQ ID NO: 25014 - protein, 10 aa, Severe acute respiratory syndrome-related coronavirus
  REGION 1..10: note = Table B: HLA-DQA1*03:01-B1*03:02L HLA-DQA1*02:01-B1*03:03L
  source 1..10: note = Severe acute respiratory syndrome coronavirus 2
GLVASIKNFK

SEQ ID NO: 25015 - protein, 10 aa, Severe acute respiratory syndrome-related coronavirus
  REGION 1..10: note = Table B: HLA-DQA1*03:01-B1*03:02L
  source 1..10: note = Severe acute respiratory syndrome coronavirus 2
ETDLTKGPHE

SEQ ID NO: 25016 - protein, 11 aa, Severe acute respiratory syndrome-related coronavirus
  REGION 1..11: note = Table B: HLA-DQA1*03:01-B1*03:02L
  source 1..11: note = Severe acute respiratory syndrome coronavirus 2
GPHEFCSQHTM

SEQ ID NO: 25017 - protein, 11 aa, Severe acute respiratory syndrome-related coronavirus
  REGION 1..11: note = Table B: HLA-DQA1*03:01-B1*03:02L HLA-DQA1*02:01-B1*03:03L
  source 1..11: note = Severe acute respiratory syndrome coronavirus 2
DGTLMIERFVS

SEQ ID NO: 25018 - protein, 11 aa, Severe acute respiratory syndrome-related coronavirus
  REGION 1..11: note = Table B: HLA-DQA1*03:01-B1*03:02L
  source 1..11: note = Severe acute respiratory syndrome coronavirus 2
AIDAYPLTKHP

SEQ ID NO: 25019 - protein, 10 aa, Severe acute respiratory syndrome-related coronavirus
  REGION 1..10: note = Table B: HLA-DQA1*03:01-B1*03:02L
  source 1..10: note = Severe acute respiratory syndrome coronavirus 2
AYPLTKHPNQ

SEQ ID NO: 25020 - protein, 10 aa, Severe acute respiratory syndrome-related coronavirus
  REGION 1..10: note = Table B: HLA-DQA1*03:01-B1*03:02L
  source 1..10: note = Severe acute respiratory syndrome coronavirus 2
DNTSRYWEPE

SEQ ID NO: 25021 - protein, 10 aa, Severe acute respiratory syndrome-related coronavirus
  REGION 1..10: note = Table B: HLA-DQA1*03:01-B1*03:02L
  source 1..10: note = Severe acute respiratory syndrome coronavirus 2
TPHTVLQAVG

SEQ ID NO: 25022 - protein, 10 aa, Severe acute respiratory syndrome-related coronavirus
  REGION 1..10: note = Table B: HLA-DQA1*03:01-B1*03:02L HLA-DQA1*02:01-B1*03:03L
  source 1..10: note = Severe acute respiratory syndrome coronavirus 2
YDHVISTSHK

SEQ ID NO: 25023 - protein, 10 aa, Severe acute respiratory syndrome-related coronavirus
  REGION 1..10: note = Table B: HLA-DQA1*03:01-B1*03:02L HLA-DQA1*01:03-B1*06:01L HLA-DQA1*02:01-B1*03:03L
  source 1..10: note = Severe acute respiratory syndrome coronavirus 2
ANGQVFGLYK

SEQ ID NO: 25024 - protein, 13 aa, Severe acute respiratory syndrome-related coronavirus
  REGION 1..13: note = Table B: HLA-DQA1*03:01-B1*03:02L HLA-DQA1*01:03-B1*06:01L
  source 1..13: note = Severe acute respiratory syndrome coronavirus 2
VGSDNVTDFNAIA

SEQ ID NO: 25025 - protein, 11 aa, Severe acute respiratory syndrome-related coronavirus
  REGION 1..11: note = Table B: HLA-DQA1*03:01-B1*03:02L
  source 1..11: note = Severe acute respiratory syndrome coronavirus 2
ATEETFKLSYG

SEQ ID NO: 25026 - protein, 10 aa, Severe acute respiratory syndrome-related coronavirus
  REGION 1..10: note = Table B: HLA-DQA1*03:01-B1*03:02L
  source 1..10: note = Severe acute respiratory syndrome coronavirus 2
ATVREVLSDR

SEQ ID NO: 25027 - protein, 10 aa, Severe acute respiratory syndrome-related coronavirus
  REGION 1..10: note = Table B: HLA-DQA1*03:01-B1*03:02L HLA-DQA1*02:01-B1*03:03L
  source 1..10: note = Severe acute respiratory syndrome coronavirus 2
TVREVLSDRE

SEQ ID NO: 25028 - protein, 11 aa, Severe acute respiratory syndrome-related coronavirus
  REGION 1..11: note = Table B: HLA-DQA1*03:01-B1*03:02L HLA-DRB1*16:01L HLA-DQA1*02:01-B1*03:03L
  source 1..11: note = Severe acute respiratory syndrome coronavirus 2
VREVLSDRELH

SEQ ID NO: 25029 - protein, 10 aa, Severe acute respiratory syndrome-related coronavirus
  REGION 1..10: note = Table B: HLA-DQA1*03:01-B1*03:02L
  source 1..10: note = Severe acute respiratory syndrome coronavirus 2
TGYRVTKNSK

SEQ ID NO: 25030 - protein, 10 aa, Severe acute respiratory syndrome-related coronavirus
  REGION 1..10: note = Table B: HLA-DQA1*03:01-B1*03:02L HLA-DQA1*01:03-B1*06:01L HLA-DQA1*02:01-B1*03:03L
  source 1..10: note = Severe acute respiratory syndrome coronavirus 2
NSKVQIGEYT

SEQ ID NO: 25031 - protein, 11 aa, Severe acute respiratory syndrome-related coronavirus
  REGION 1..11: note = Table B: HLA-DQA1*03:01-B1*03:02L
  source 1..11: note = Severe acute respiratory syndrome coronavirus 2
VQIGEYTFEKG

SEQ ID NO: 25032 - protein, 11 aa, Severe acute respiratory syndrome-related coronavirus
  REGION 1..11: note = Table B: HLA-DQA1*03:01-B1*03:02L HLA-DQA1*01:03-B1*06:01L HLA-DQA1*02:01-B1*03:03L
  source 1..11: note = Severe acute respiratory syndrome coronavirus 2
DYGDAVVYRGT

SEQ ID NO: 25033 - protein, 10 aa, Severe acute respiratory syndrome-related coronavirus
  REGION 1..10: note = Table B: HLA-DQA1*03:01-B1*03:02L
  source 1..10: note = Severe acute respiratory syndrome coronavirus 2
GTTTYKLNVG

SEQ ID NO: 25034 - protein, 10 aa, Severe acute respiratory syndrome-related coronavirus
  REGION 1..10: note = Table B: HLA-DQA1*03:01-B1*03:02L HLA-DQA1*01:03-B1*06:01L HLA-DQA1*02:01-B1*03:03L
  source 1..10: note = Severe acute respiratory syndrome coronavirus 2
HTVMPLSAPT

SEQ ID NO: 25035 - protein, 12 aa, Severe acute respiratory syndrome-related coronavirus
  REGION 1..12: note = Table B: HLA-DQA1*03:01-B1*03:02L
  source 1..12: note = Severe acute respiratory syndrome coronavirus 2
MPLSAPTLVPQE

SEQ ID NO: 25036 - protein, 10 aa, Severe acute respiratory syndrome-related coronavirus
  REGION 1..10: note = Table B: HLA-DQA1*03:01-B1*03:02L
  source 1..10: note = Severe acute respiratory syndrome coronavirus 2
TLVPQEHYVR

SEQ ID NO: 25037 - protein, 10 aa, Severe acute respiratory syndrome-related coronavirus
  REGION 1..10: note = Table B: HLA-DQA1*03:01-B1*03:02L HLA-DQA1*02:01-B1*03:03L
  source 1..10: note = Severe acute respiratory syndrome coronavirus 2
GLALYYPSAR

SEQ ID NO: 25038 - protein, 10 aa, Severe acute respiratory syndrome-related coronavirus
  REGION 1..10: note = Table B: HLA-DQA1*03:01-B1*03:02L
  source 1..10: note = Severe acute respiratory syndrome coronavirus 2
HAAVDALCEK

SEQ ID NO: 25039 - protein, 10 aa, Severe acute respiratory syndrome-related coronavirus
  REGION 1..10: note = Table B: HLA-DQA1*03:01-B1*03:02L
  source 1..10: note = Severe acute respiratory syndrome coronavirus 2
VNALPETTAD

SEQ ID NO: 25040 - protein, 10 aa, Severe acute respiratory syndrome-related coronavirus
  REGION 1..10: note = Table B: HLA-DQA1*03:01-B1*03:02L
  source 1..10: note = Severe acute respiratory syndrome coronavirus 2
LPAPRTLLTK

SEQ ID NO: 25041 - protein, 10 aa, Severe acute respiratory syndrome-related coronavirus
  REGION 1..10: note = Table B: HLA-DQA1*03:01-B1*03:02L HLA-DPA1*01:02-B1*04:01L HLA-DQA1*01:03-B1*06:01L HLA-DQA1*02:01-B1*03:03L
  source 1..10: note = Severe acute respiratory syndrome coronavirus 2
YKGVITHDVS

SEQ ID NO: 25042 - protein, 10 aa, Severe acute respiratory syndrome-related coronavirus
  REGION 1..10: note = Table B: HLA-DQA1*03:01-B1*03:02L
  source 1..10: note = Severe acute respiratory syndrome coronavirus 2
THDVSSAINR

SEQ ID NO: 25043 - protein, 10 aa, Severe acute respiratory syndrome-related coronavirus
  REGION 1..10: note = Table B: HLA-DQA1*03:01-B1*03:02L
  source 1..10: note = Severe acute respiratory syndrome coronavirus 2
HDVSSAINRP

SEQ ID NO: 25044 - protein, 11 aa, Severe acute respiratory syndrome-related coronavirus
  REGION 1..11: note = Table B: HLA-DQA1*03:01-B1*03:02L
  source 1..11: note = Severe acute respiratory syndrome coronavirus 2
RPQIGVVREFL

SEQ ID NO: 25045 - protein, 12 aa, Severe acute respiratory syndrome-related coronavirus
  REGION 1..12: note = Table B: HLA-DQA1*03:01-B1*03:02L
  source 1..12: note = Severe acute respiratory syndrome coronavirus 2
RKAVFISPYNSQ

SEQ ID NO: 25046 - protein, 10 aa, Severe acute respiratory syndrome-related coronavirus
  REGION 1..10: note = Table B: HLA-DQA1*03:01-B1*03:02L HLA-DQA1*02:01-B1*03:03L
  source 1..10: note = Severe acute respiratory syndrome coronavirus 2
QNAVASKILG

SEQ ID NO: 25047 - protein, 11 aa, Severe acute respiratory syndrome-related coronavirus
  REGION 1..11: note = Table B: HLA-DQA1*03:01-B1*03:02L
  source 1..11: note = Severe acute respiratory syndrome coronavirus 2
TVDSSQGSEYD

SEQ ID NO: 25048 - protein, 15 aa, Severe acute respiratory syndrome-related coronavirus
  REGION 1..15: note = Table B: HLA-DQA1*03:01-B1*03:02L
  source 1..15: note = Severe acute respiratory syndrome coronavirus 2
VDSSQGSEYDYVIFT

SEQ ID NO: 25049 - protein, 10 aa, Severe acute respiratory syndrome-related coronavirus
  REGION 1..10: note = Table B: HLA-DQA1*03:01-B1*03:02L HLA-DPA1*01:02-B1*04:01L HLA-DQA1*02:01-B1*03:03L
  source 1..10: note = Severe acute respiratory syndrome coronavirus 2
VNRFNVAITR

SEQ ID NO: 25050 - protein, 10 aa, Severe acute respiratory syndrome-related coronavirus
  REGION 1..10: note = Table B: HLA-DQA1*03:01-B1*03:02L HLA-DQA1*01:03-B1*06:01L HLA-DQA1*02:01-B1*03:03L
  source 1..10: note = Severe acute respiratory syndrome coronavirus 2
QFTSLEIPRR

SEQ ID NO: 25051 - protein, 10 aa, Severe acute respiratory syndrome-related coronavirus
  REGION 1..10: note = Table B: HLA-DQA1*03:01-B1*03:02L
  source 1..10: note = Severe acute respiratory syndrome coronavirus 2
QAENVTGLFK

SEQ ID NO: 25052 - protein, 10 aa, Severe acute respiratory syndrome-related coronavirus
  REGION 1..10: note = Table B: HLA-DQA1*03:01-B1*03:02L
  source 1..10: note = Severe acute respiratory syndrome coronavirus 2
KVITGLHPTQ

SEQ ID NO: 25053 - protein, 10 aa, Severe acute respiratory syndrome-related coronavirus
  REGION 1..10: note = Table B: HLA-DQA1*03:01-B1*03:02L
  source 1..10: note = Severe acute respiratory syndrome coronavirus 2
APTHLSVDTK

SEQ ID NO: 25054 - protein, 11 aa, Severe acute respiratory syndrome-related coronavirus
  REGION 1..11: note = Table B: HLA-DQA1*03:01-B1*03:02L
  source 1..11: note = Severe acute respiratory syndrome coronavirus 2
IPGIPKDMTYR

SEQ ID NO: 25055 - protein, 10 aa, Severe acute respiratory syndrome-related coronavirus
  REGION 1..10: note = Table B: HLA-DQA1*03:01-B1*03:02L HLA-DQA1*02:01-B1*03:03L
  source 1..10: note = Severe acute respiratory syndrome coronavirus 2
YPNMFITREE

SEQ ID NO: 25056 - protein, 10 aa, Severe acute respiratory syndrome-related coronavirus
  REGION 1..10: note = Table B: HLA-DQA1*03:01-B1*03:02L HLA-DPA1*01:02-B1*04:01L HLA-DRB1*16:01L HLA-DQA1*02:01-B1*03:03L
  source 1..10: note = Severe acute respiratory syndrome coronavirus 2
MFITREEAIR

SEQ ID NO: 25057 - protein, 10 aa, Severe acute respiratory syndrome-related coronavirus
  REGION 1..10: note = Table B: HLA-DQA1*03:01-B1*03:02L
  source 1..10: note = Severe acute respiratory syndrome coronavirus 2
TREEAIRHVR

SEQ ID NO: 25058 - protein, 10 aa, Severe acute respiratory syndrome-related coronavirus
  REGION 1..10: note = Table B: HLA-DQA1*03:01-B1*03:02L HLA-DQA1*01:03-B1*06:01L HLA-DQA1*02:01-B1*03:03L
  source 1..10: note = Severe acute respiratory syndrome coronavirus 2
VGTNLPLQLG

SEQ ID NO: 25059 - protein, 12 aa, Severe acute respiratory syndrome-related coronavirus
  REGION 1..12: note = Table B: HLA-DQA1*03:01-B1*03:02L HLA-DQA1*01:03-B1*06:01L HLA-DQA1*02:01-B1*03:03L
  source 1..12: note = Severe acute respiratory syndrome coronavirus 2
STGVNLVAVPTG

SEQ ID NO: 25060 - protein, 11 aa, Severe acute respiratory syndrome-related coronavirus
  REGION 1..11: note = Table B: HLA-DQA1*03:01-B1*03:02L HLA-DQA1*01:03-B1*06:01L HLA-DQA1*02:01-B1*03:03L
  source 1..11: note = Severe acute respiratory syndrome coronavirus 2
TPNNTDFSRVS

SEQ ID NO: 25061 - protein, 11 aa, Severe acute respiratory syndrome-related coronavirus
  REGION 1..11: note = Table B: HLA-DQA1*03:01-B1*03:02L
  source 1..11: note = Severe acute respiratory syndrome coronavirus 2
SAKPPPGDQFK

SEQ ID NO: 25062 - protein, 10 aa, Severe acute respiratory syndrome-related coronavirus
  REGION 1..10: note = Table B: HLA-DQA1*03:01-B1*03:02L HLA-DQA1*02:01-B1*03:03L
  source 1..10: note = Severe acute respiratory syndrome coronavirus 2
SDTLKNLSDR

SEQ ID NO: 25063 - protein, 10 aa, Severe acute respiratory syndrome-related coronavirus
  REGION 1..10: note = Table B: HLA-DQA1*03:01-B1*03:02L HLA-DQA1*01:03-B1*06:01L HLA-DQA1*02:01-B1*03:03L
  source 1..10: note = Severe acute respiratory syndrome coronavirus 2
GFTGNLQSNH

SEQ ID NO: 25064 - protein, 10 aa, Severe acute respiratory syndrome-related coronavirus
  REGION 1..10: note = Table B: HLA-DQA1*03:01-B1*03:02L
  source 1..10: note = Severe acute respiratory syndrome coronavirus 2
TIEYPIIGDE

SEQ ID NO: 25065 - protein, 12 aa, Severe acute respiratory syndrome-related coronavirus
  REGION 1..12: note = Table B: HLA-DQA1*03:01-B1*03:02L HLA-DQA1*01:03-B1*06:01L HLA-DQA1*02:01-B1*03:03L
  source 1..12: note = Severe acute respiratory syndrome coronavirus 2
YDAQPCSDKAYK

SEQ ID NO: 25066 - protein, 10 aa, Severe acute respiratory syndrome-related coronavirus
  REGION 1..10: note = Table B: HLA-DQA1*03:01-B1*03:02L
  source 1..10: note = Severe acute respiratory syndrome coronavirus 2
ATHSDKFTDG

SEQ ID NO: 25067 - protein, 10 aa, Severe acute respiratory syndrome-related coronavirus
  REGION 1..10: note = Table B: HLA-DQA1*03:01-B1*03:02L
  source 1..10: note = Severe acute respiratory syndrome coronavirus 2
RYPANSIVCR

SEQ ID NO: 25068 - protein, 10 aa, Severe acute respiratory syndrome-related coronavirus
  REGION 1..10: note = Table B: HLA-DQA1*03:01-B1*03:02L HLA-DQA1*01:03-B1*06:01L
  source 1..10: note = Severe acute respiratory syndrome coronavirus 2
FDTRVLSNLN

SEQ ID NO: 25069 - protein, 10 aa, Severe acute respiratory syndrome-related coronavirus
  REGION 1..10: note = Table B: HLA-DQA1*03:01-B1*03:02L HLA-DQA1*01:03-B1*06:01L HLA-DQA1*02:01-B1*03:03L
  source 1..10: note = Severe acute respiratory syndrome coronavirus 2
DGGSLYVNKH

SEQ ID NO: 25070 - protein, 10 aa, Severe acute respiratory syndrome-related coronavirus
  REGION 1..10: note = Table B: HLA-DQA1*03:01-B1*03:02L HLA-DQA1*02:01-B1*03:03L
  source 1..10: note = Severe acute respiratory syndrome coronavirus 2
AFHTPAFDKS

SEQ ID NO: 25071 - protein, 12 aa, Severe acute respiratory syndrome-related coronavirus
  REGION 1..12: note = Table B: HLA-DQA1*03:01-B1*03:02L
  source 1..12: note = Severe acute respiratory syndrome coronavirus 2
YSDSPCESHGKQ

SEQ ID NO: 25072 - protein, 11 aa, Severe acute respiratory syndrome-related coronavirus
  REGION 1..11: note = Table B: HLA-DQA1*03:01-B1*03:02L
  source 1..11: note = Severe acute respiratory syndrome coronavirus 2
SHGKQVVSDID

SEQ ID NO: 25073 - protein, 13 aa, Severe acute respiratory syndrome-related coronavirus
  REGION 1..13: note = Table B: HLA-DQA1*03:01-B1*03:02L HLA-DRB1*16:01L HLA-DQA1*02:01-B1*03:03L HLA-DRB1*15:03L
  source 1..13: note = Severe acute respiratory syndrome coronavirus 2
AGFSLWVYKQFDT

SEQ ID NO: 25074 - protein, 11 aa, Severe acute respiratory syndrome-related coronavirus
  REGION 1..11: note = Table B: HLA-DQA1*03:01-B1*03:02L
  source 1..11: note = Severe acute respiratory syndrome coronavirus 2
FDGQQGEVPVS

SEQ ID NO: 25075 - protein, 10 aa, Severe acute respiratory syndrome-related coronavirus
  REGION 1..10: note = Table B: HLA-DQA1*03:01-B1*03:02L
  source 1..10: note = Severe acute respiratory syndrome coronavirus 2
NNTVYTKVDG

SEQ ID NO: 25076 - protein, 10 aa, Severe acute respiratory syndrome-related coronavirus
  REGION 1..10: note = Table B: HLA-DQA1*03:01-B1*03:02L
  source 1..10: note = Severe acute respiratory syndrome coronavirus 2
GVDVELFENK

SEQ ID NO: 25077 - protein, 10 aa, Severe acute respiratory syndrome-related coronavirus
  REGION 1..10: note = Table B: HLA-DQA1*03:01-B1*03:02L HLA-DQA1*01:03-B1*06:01L HLA-DQA1*02:01-B1*03:03L
  source 1..10: note = Severe acute respiratory syndrome coronavirus 2
NKTTLPVNVA

SEQ ID NO: 25078 - protein, 10 aa, Severe acute respiratory syndrome-related coronavirus
  REGION 1..10: note = Table B: HLA-DQA1*03:01-B1*03:02L
  source 1..10: note = Severe acute respiratory syndrome coronavirus 2
AKRNIKPVPE

SEQ ID NO: 25079 - protein, 10 aa, Severe acute respiratory syndrome-related coronavirus
  REGION 1..10: note = Table B: HLA-DQA1*03:01-B1*03:02L
  source 1..10: note = Severe acute respiratory syndrome coronavirus 2
RVDGQVDLFR

SEQ ID NO: 25080 - protein, 10 aa, Severe acute respiratory syndrome-related coronavirus
  REGION 1..10: note = Table B: HLA-DQA1*03:01-B1*03:02L
  source 1..10: note = Severe acute respiratory syndrome coronavirus 2
GQVDLFRNAR

SEQ ID NO: 25081 - protein, 10 aa, Severe acute respiratory syndrome-related coronavirus
  REGION 1..10: note = Table B: HLA-DQA1*03:01-B1*03:02L
  source 1..10: note = Severe acute respiratory syndrome coronavirus 2
PSVGPKQASL

SEQ ID NO: 25082 - protein, 10 aa, Severe acute respiratory syndrome-related coronavirus
  REGION 1..10: note = Table B: HLA-DQA1*03:01-B1*03:02L
  source 1..10: note = Severe acute respiratory syndrome coronavirus 2
AVKTQFNYYK

SEQ ID NO: 25083 - protein, 10 aa, Severe acute respiratory syndrome-related coronavirus
  REGION 1..10: note = Table B: HLA-DQA1*03:01-B1*03:02L
  source 1..10: note = Severe acute respiratory syndrome coronavirus 2
KKVDGVVQQL

SEQ ID NO: 25084 - protein, 11 aa, Severe acute respiratory syndrome-related coronavirus
  REGION 1..11: note = Table B: HLA-DQA1*03:01-B1*03:02L
  source 1..11: note = Severe acute respiratory syndrome coronavirus 2
QLPETYFTQSR

SEQ ID NO: 25085 - protein, 11 aa, Severe acute respiratory syndrome-related coronavirus
  REGION 1..11: note = Table B: HLA-DQA1*03:01-B1*03:02L HLA-DQA1*02:01-B1*03:03L
  source 1..11: note = Severe acute respiratory syndrome coronavirus 2
PETYFTQSRNL

SEQ ID NO: 25086 - protein, 10 aa, Severe acute respiratory syndrome-related coronavirus
  REGION 1..10: note = Table B: HLA-DQA1*03:01-B1*03:02L HLA-DPA1*01:02-B1*04:01L HLA-DQA1*02:01-B1*03:03L
  source 1..10: note = Severe acute respiratory syndrome coronavirus 2
TYFTQSRNLQ

SEQ ID NO: 25087 - protein, 10 aa, Severe acute respiratory syndrome-related coronavirus
  REGION 1..10: note = Table B: HLA-DQA1*03:01-B1*03:02L
  source 1..10: note = Severe acute respiratory syndrome coronavirus 2
SRNLQEFKPR

SEQ ID NO: 25088 - protein, 12 aa, Severe acute respiratory syndrome-related coronavirus
  REGION 1..12: note = Table B: HLA-DQA1*03:01-B1*03:02L
  source 1..12: note = Severe acute respiratory syndrome coronavirus 2
KPRSQMEIDFLE

SEQ ID NO: 25089 - protein, 10 aa, Severe acute respiratory syndrome-related coronavirus
  REGION 1..10: note = Table B: HLA-DQA1*03:01-B1*03:02L HLA-DPA1*01:02-B1*04:01L
  source 1..10: note = Severe acute respiratory syndrome coronavirus 2
YKLEGYAFEH

SEQ ID NO: 25090 - protein, 10 aa, Severe acute respiratory syndrome-related coronavirus
  REGION 1..10: note = Table B: HLA-DQA1*03:01-B1*03:02L
  source 1..10: note = Severe acute respiratory syndrome coronavirus 2
EHIVYGDFSH

SEQ ID NO: 25091 - protein, 11 aa, Severe acute respiratory syndrome-related coronavirus
  REGION 1..11: note = Table B: HLA-DQA1*03:01-B1*03:02L
  source 1..11: note = Severe acute respiratory syndrome coronavirus 2
GLHLLIGLAKR

SEQ ID NO: 25092 - protein, 10 aa, Severe acute respiratory syndrome-related coronavirus
  REGION 1..10: note = Table B: HLA-DQA1*03:01-B1*03:02L HLA-DQA1*02:01-B1*03:03L
  source 1..10: note = Severe acute respiratory syndrome coronavirus 2
DFIPMDSTVK

SEQ ID NO: 25093 - protein, 11 aa, Severe acute respiratory syndrome-related coronavirus
  REGION 1..11: note = Table B: HLA-DQA1*03:01-B1*03:02L HLA-DQA1*01:03-B1*06:01L
  source 1..11: note = Severe acute respiratory syndrome coronavirus 2
DSTVKNYFITD

SEQ ID NO: 25094 - protein, 10 aa, Severe acute respiratory syndrome-related coronavirus
  REGION 1..10: note = Table B: HLA-DQA1*03:01-B1*03:02L HLA-DQA1*01:03-B1*06:01L HLA-DQA1*02:01-B1*03:03L
  source 1..10: note = Severe acute respiratory syndrome coronavirus 2
SVVSKVVKVT

SEQ ID NO: 25095 - protein, 10 aa, Severe acute respiratory syndrome-related coronavirus
  REGION 1..10: note = Table B: HLA-DQA1*03:01-B1*03:02L HLA-DQA1*02:01-B1*03:03L
  source 1..10: note = Severe acute respiratory syndrome coronavirus 2
DGHVETFYPK

SEQ ID NO: 25096 - protein, 10 aa, Severe acute respiratory syndrome-related coronavirus
  REGION 1..10: note = Table B: HLA-DQA1*03:01-B1*03:02L
  source 1..10: note = Severe acute respiratory syndrome coronavirus 2
AMPNLYKMQR

SEQ ID NO: 25097 - protein, 11 aa, Severe acute respiratory syndrome-related coronavirus
  REGION 1..11: note = Table B: HLA-DQA1*03:01-B1*03:02L
  source 1..11: note = Severe acute respiratory syndrome coronavirus 2
LNTLTLAVPYN

SEQ ID NO: 25098 - protein, 10 aa, Severe acute respiratory syndrome-related coronavirus
  REGION 1..10: note = Table B: HLA-DQA1*03:01-B1*03:02L
  source 1..10: note = Severe acute respiratory syndrome coronavirus 2
AVPYNMRVIH

SEQ ID NO: 25099 - protein, 11 aa, Severe acute respiratory syndrome-related coronavirus
  REGION 1..11: note = Table B: HLA-DQA1*03:01-B1*03:02L
  source 1..11: note = Severe acute respiratory syndrome coronavirus 2
VPYNMRVIHFG

SEQ ID NO: 25100 - protein, 11 aa, Severe acute respiratory syndrome-related coronavirus
  REGION 1..11: note = Table B: HLA-DQA1*03:01-B1*03:02L
  source 1..11: note = Severe acute respiratory syndrome coronavirus 2
GAGSDKGVAPG

SEQ ID NO: 25101 - protein, 11 aa, Severe acute respiratory syndrome-related coronavirus
  REGION 1..11: note = Table B: HLA-DQA1*03:01-B1*03:02L HLA-DQA1*02:01-B1*03:03L
  source 1..11: note = Severe acute respiratory syndrome coronavirus 2
TAVLRQWLPTG

SEQ ID NO: 25102 - protein, 11 aa, Severe acute respiratory syndrome-related coronavirus
  REGION 1..11: note = Table B: HLA-DQA1*03:01-B1*03:02L
  source 1..11: note = Severe acute respiratory syndrome coronavirus 2
DPKTKNVTKEN

SEQ ID NO: 25103 - protein, 12 aa, Severe acute respiratory syndrome-related coronavirus
  REGION 1..12: note = Table B: HLA-DQA1*03:01-B1*03:02L
  source 1..12: note = Severe acute respiratory syndrome coronavirus 2
TKNVTKENDSKE

SEQ ID NO: 25104 - protein, 10 aa, Severe acute respiratory syndrome-related coronavirus
  REGION 1..10: note = Table B: HLA-DQA1*03:01-B1*03:02L HLA-DQA1*01:03-B1*06:01L HLA-DQA1*02:01-B1*03:03L
  source 1..10: note = Severe acute respiratory syndrome coronavirus 2
GSVAIKITEH

SEQ ID NO: 25105 - protein, 10 aa, Severe acute respiratory syndrome-related coronavirus
  REGION 1..10: note = Table B: HLA-DQA1*03:01-B1*03:02L HLA-DQA1*01:03-B1*06:01L HLA-DQA1*02:01-B1*03:03L
  source 1..10: note = Severe acute respiratory syndrome coronavirus 2
LGKPREQIDG

SEQ ID NO: 25106 - protein, 10 aa, Severe acute respiratory syndrome-related coronavirus
  REGION 1..10: note = Table B: HLA-DQA1*03:01-B1*03:02L HLA-DQA1*02:01-B1*03:03L
  source 1..10: note = Severe acute respiratory syndrome coronavirus 2
KLRGTAVMSL

SEQ ID NO: 25107 - protein, 10 aa, Severe acute respiratory syndrome-related coronavirus
  REGION 1..10: note = Table B: HLA-DQA1*03:01-B1*03:02L HLA-DQA1*01:03-B1*06:01L HLA-DQA1*02:01-B1*03:03L
  source 1..10: note = Severe acute respiratory syndrome coronavirus 2
GTAVMSLKEG

SEQ ID NO: 25108 - protein, 10 aa, Severe acute respiratory syndrome-related coronavirus
  REGION 1..10: note = Table B: HLA-DQA1*03:01-B1*03:02L
  source 1..10: note = Severe acute respiratory syndrome coronavirus 2
MSLKEGQIND

SEQ ID NO: 25109 - protein, 10 aa, Severe acute respiratory syndrome-related coronavirus
  REGION 1..10: note = Table B: HLA-DQA1*03:01-B1*03:02L
  source 1..10: note = Severe acute respiratory syndrome coronavirus 2
MILSLLSKGR

SEQ ID NO: 25110 - protein, 10 aa, Severe acute respiratory syndrome-related coronavirus
  REGION 1..10: note = Table B: HLA-DQA1*03:01-B1*03:02L
  source 1..10: note = Severe acute respiratory syndrome coronavirus 2
GRLIIRENNR

SEQ ID NO: 25111 - protein, 11 aa, Severe acute respiratory syndrome-related coronavirus
  REGION 1..11: note = Table B: HLA-DQA1*03:01-B1*03:02L
  source 1..11: note = Severe acute respiratory syndrome coronavirus 2
LPPAYTNSFTR

SEQ ID NO: 25112 - protein, 11 aa, Severe acute respiratory syndrome-related coronavirus
  REGION 1..11: note = Table B: HLA-DQA1*03:01-B1*03:02L
  source 1..11: note = Severe acute respiratory syndrome coronavirus 2
PPAYTNSFTRG

SEQ ID NO: 25113 - protein, 11 aa, Severe acute respiratory syndrome-related coronavirus
  REGION 1..11: note = Table B: HLA-DQA1*03:01-B1*03:02L
  source 1..11: note = Severe acute respiratory syndrome coronavirus 2
NSFTRGVYYPD

SEQ ID NO: 25114 - protein, 11 aa, Severe acute respiratory syndrome-related coronavirus
  REGION 1..11: note = Table B: HLA-DQA1*03:01-B1*03:02L
  source 1..11: note = Severe acute respiratory syndrome coronavirus 2
YPDKVFRSSVL

SEQ ID NO: 25115 - protein, 10 aa, Severe acute respiratory syndrome-related coronavirus
  REGION 1..10: note = Table B: HLA-DQA1*03:01-B1*03:02L HLA-DQA1*02:01-B1*03:03L
  source 1..10: note = Severe acute respiratory syndrome coronavirus 2
DGVYFASTEK

SEQ ID NO: 25116 - protein, 13 aa, Severe acute respiratory syndrome-related coronavirus
  REGION 1..13: note = Table B: HLA-DQA1*03:01-B1*03:02L
  source 1..13: note = Severe acute respiratory syndrome coronavirus 2
IIRGWIFGTTLDS

SEQ ID NO: 25117 - protein, 11 aa, Severe acute respiratory syndrome-related coronavirus
  REGION 1..11: note = Table B: HLA-DQA1*03:01-B1*03:02L HLA-DQA1*01:03-B1*06:01L HLA-DQA1*02:01-B1*03:03L
  source 1..11: note = Severe acute respiratory syndrome coronavirus 2
DSKTQSLLIVN

SEQ ID NO: 25118 - protein, 10 aa, Severe acute respiratory syndrome-related coronavirus
  REGION 1..10: note = Table B: HLA-DQA1*03:01-B1*03:02L HLA-DQA1*02:01-B1*03:03L
  source 1..10: note = Severe acute respiratory syndrome coronavirus 2
KTQSLLIVNN

SEQ ID NO: 25119 - protein, 11 aa, Severe acute respiratory syndrome-related coronavirus
  REGION 1..11: note = Table B: HLA-DQA1*03:01-B1*03:02L
  source 1..11: note = Severe acute respiratory syndrome coronavirus 2
QSLLIVNNATN

SEQ ID NO: 25120 - protein, 10 aa, Severe acute respiratory syndrome-related coronavirus
  REGION 1..10: note = Table B: HLA-DQA1*03:01-B1*03:02L
  source 1..10: note = Severe acute respiratory syndrome coronavirus 2
DPFLGVYYHK

SEQ ID NO: 25121 - protein, 11 aa, Severe acute respiratory syndrome-related coronavirus
  REGION 1..11: note = Table B: HLA-DQA1*03:01-B1*03:02L HLA-DQA1*01:03-B1*06:01L
  source 1..11: note = Severe acute respiratory syndrome coronavirus 2
NNKSWMESEFR

SEQ ID NO: 25122 - protein, 11 aa, Severe acute respiratory syndrome-related coronavirus
  REGION 1..11: note = Table B: HLA-DQA1*03:01-B1*03:02L
  source 1..11: note = Severe acute respiratory syndrome coronavirus 2
QPFLMDLEGKQ

SEQ ID NO: 25123 - protein, 10 aa, Severe acute respiratory syndrome-related coronavirus
  REGION 1..10: note = Table B: HLA-DQA1*03:01-B1*03:02L
  source 1..10: note = Severe acute respiratory syndrome coronavirus 2
DLEGKQGNFK

SEQ ID NO: 25124 - protein, 10 aa, Severe acute respiratory syndrome-related coronavirus
  REGION 1..10: note = Table B: HLA-DQA1*03:01-B1*03:02L
  source 1..10: note = Severe acute respiratory syndrome coronavirus 2
REFVFKNIDG

SEQ ID NO: 25125 - protein, 10 aa, Severe acute respiratory syndrome-related coronavirus
  REGION 1..10: note = Table B: HLA-DQA1*03:01-B1*03:02L
  source 1..10: note = Severe acute respiratory syndrome coronavirus 2
VFKNIDGYFK

SEQ ID NO: 25126 - protein, 12 aa, Severe acute respiratory syndrome-related coronavirus
  REGION 1..12: note = Table B: HLA-DQA1*03:01-B1*03:02L HLA-DQA1*02:01-B1*03:03L
  source 1..12: note = Severe acute respiratory syndrome coronavirus 2
LHRSYLTPGDSS

SEQ ID NO: 25127 - protein, 10 aa, Severe acute respiratory syndrome-related coronavirus
  REGION 1..10: note = Table B: HLA-DQA1*03:01-B1*03:02L
  source 1..10: note = Severe acute respiratory syndrome coronavirus 2
YLQPRTFLLK

SEQ ID NO: 25128 - protein, 10 aa, Severe acute respiratory syndrome-related coronavirus
  REGION 1..10: note = Table B: HLA-DQA1*03:01-B1*03:02L
  source 1..10: note = Severe acute respiratory syndrome coronavirus 2
SFVIRGDEVR

SEQ ID NO: 25129 - protein, 10 aa, Severe acute respiratory syndrome-related coronavirus
  REGION 1..10: note = Table B: HLA-DQA1*03:01-B1*03:02L HLA-DQA1*02:01-B1*03:03L
  source 1..10: note = Severe acute respiratory syndrome coronavirus 2
TGKIADYNYK

SEQ ID NO: 25130 - protein, 10 aa, Severe acute respiratory syndrome-related coronavirus
  REGION 1..10: note = Table B: HLA-DQA1*03:01-B1*03:02L HLA-DRB1*14:17L
  source 1..10: note = Severe acute respiratory syndrome coronavirus 2
AWNSNNLDSK

SEQ ID NO: 25131 - protein, 10 aa, Severe acute respiratory syndrome-related coronavirus
  REGION 1..10: note = Table B: HLA-DQA1*03:01-B1*03:02L
  source 1..10: note = Severe acute respiratory syndrome coronavirus 2
NSNNLDSKVG

SEQ ID NO: 25132 - protein, 11 aa, Severe acute respiratory syndrome-related coronavirus
  REGION 1..11: note = Table B: HLA-DQA1*03:01-B1*03:02L
  source 1..11: note = Severe acute respiratory syndrome coronavirus 2
DSKVGGNYNYL

SEQ ID NO: 25133 - protein, 10 aa, Severe acute respiratory syndrome-related coronavirus
  REGION 1..10: note = Table B: HLA-DQA1*03:01-B1*03:02L
  source 1..10: note = Severe acute respiratory syndrome coronavirus 2
VGGNYNYLYR

SEQ ID NO: 25134 - protein, 11 aa, Severe acute respiratory syndrome-related coronavirus
  REGION 1..11: note = Table B: HLA-DQA1*03:01-B1*03:02L HLA-DQA1*01:03-B1*06:01L
  source 1..11: note = Severe acute respiratory syndrome coronavirus 2
RDISTEIYQAG

SEQ ID NO: 25135 - protein, 12 aa, Severe acute respiratory syndrome-related coronavirus
  REGION 1..12: note = Table B: HLA-DQA1*03:01-B1*03:02L HLA-DQA1*01:03-B1*06:01L
  source 1..12: note = Severe acute respiratory syndrome coronavirus 2
ISTEIYQAGSTP

SEQ ID NO: 25136 - protein, 13 aa, Severe acute respiratory syndrome-related coronavirus
  REGION 1..13: note = Table B: HLA-DQA1*03:01-B1*03:02L
  source 1..13: note = Severe acute respiratory syndrome coronavirus 2
YQAGSTPCNGVEG

SEQ ID NO: 25137 - protein, 10 aa, Severe acute respiratory syndrome-related coronavirus
  REGION 1..10: note = Table B: HLA-DQA1*03:01-B1*03:02L
  source 1..10: note = Severe acute respiratory syndrome coronavirus 2
TNGVGYQPYR

SEQ ID NO: 25138 - protein, 11 aa, Severe acute respiratory syndrome-related coronavirus
  REGION 1..11: note = Table B: HLA-DQA1*03:01-B1*03:02L
  source 1..11: note = Severe acute respiratory syndrome coronavirus 2
GPKKSTNLVKN

SEQ ID NO: 25139 - protein, 12 aa, Severe acute respiratory syndrome-related coronavirus
  REGION 1..12: note = Table B: HLA-DQA1*03:01-B1*03:02L
  source 1..12: note = Severe acute respiratory syndrome coronavirus 2
VNFNFNGLTGTG

SEQ ID NO: 25140 - protein, 10 aa, Severe acute respiratory syndrome-related coronavirus
  REGION 1..10: note = Table B: HLA-DQA1*03:01-B1*03:02L HLA-DQA1*01:03-B1*06:01L HLA-DQA1*02:01-B1*03:03L
  source 1..10: note = Severe acute respiratory syndrome coronavirus 2
TGVLTESNKK

SEQ ID NO: 25141 - protein, 10 aa, Severe acute respiratory syndrome-related coronavirus
  REGION 1..10: note = Table B: HLA-DQA1*03:01-B1*03:02L
  source 1..10: note = Severe acute respiratory syndrome coronavirus 2
KFLPFQQFGR

SEQ ID NO: 25142 - protein, 14 aa, Severe acute respiratory syndrome-related coronavirus
  REGION 1..14: note = Table B: HLA-DQA1*03:01-B1*03:02L
  source 1..14: note = Severe acute respiratory syndrome coronavirus 2
EILDITPCSFGGVS

SEQ ID NO: 25143 - protein, 12 aa, Severe acute respiratory syndrome-related coronavirus
  REGION 1..12: note = Table B: HLA-DQA1*03:01-B1*03:02L
  source 1..12: note = Severe acute respiratory syndrome coronavirus 2
VSVITPGTNTSN

SEQ ID NO: 25144 - protein, 12 aa, Severe acute respiratory syndrome-related coronavirus
  REGION 1..12: note = Table B: HLA-DQA1*03:01-B1*03:02L HLA-DQA1*01:03-B1*06:01L
  source 1..12: note = Severe acute respiratory syndrome coronavirus 2
NTSNQVAVLYQD

SEQ ID NO: 25145 - protein, 10 aa, Severe acute respiratory syndrome-related coronavirus
  REGION 1..10: note = Table B: HLA-DQA1*03:01-B1*03:02L
  source 1..10: note = Severe acute respiratory syndrome coronavirus 2
HADQLTPTWR

SEQ ID NO: 25146 - protein, 10 aa, Severe acute respiratory syndrome-related coronavirus
  REGION 1..10: note = Table B: HLA-DQA1*03:01-B1*03:02L
  source 1..10: note = Severe acute respiratory syndrome coronavirus 2
TQTNSPRRAR

SEQ ID NO: 25147 - protein, 11 aa, Severe acute respiratory syndrome-related coronavirus
  REGION 1..11: note = Table B: HLA-DQA1*03:01-B1*03:02L
  source 1..11: note = Severe acute respiratory syndrome coronavirus 2
SVASQSIIAYT

SEQ ID NO: 25148 - protein, 12 aa, Severe acute respiratory syndrome-related coronavirus
  REGION 1..12: note = Table B: HLA-DQA1*03:01-B1*03:02L
  source 1..12: note = Severe acute respiratory syndrome coronavirus 2
GAENSVAYSNNS

SEQ ID NO: 25149 - protein, 10 aa, Severe acute respiratory syndrome-related coronavirus
  REGION 1..10: note = Table B: HLA-DQA1*03:01-B1*03:02L HLA-DQA1*01:03-B1*06:01L HLA-DQA1*02:01-B1*03:03L
  source 1..10: note = Severe acute respiratory syndrome coronavirus 2
NSIAIPTNFT

SEQ ID NO: 25150 - protein, 10 aa, Severe acute respiratory syndrome-related coronavirus
  REGION 1..10: note = Table B: HLA-DQA1*03:01-B1*03:02L HLA-DQA1*01:03-B1*06:01L HLA-DQA1*02:01-B1*03:03L
  source 1..10: note = Severe acute respiratory syndrome coronavirus 2
SVTTEILPVS

SEQ ID NO: 25151 - protein, 10 aa, Severe acute respiratory syndrome-related coronavirus
  REGION 1..10: note = Table B: HLA-DQA1*03:01-B1*03:02L HLA-DQA1*01:03-B1*06:01L HLA-DQA1*02:01-B1*03:03L
  source 1..10: note = Severe acute respiratory syndrome coronavirus 2
ALTGIAVEQD

SEQ ID NO: 25152 - protein, 10 aa, Severe acute respiratory syndrome-related coronavirus
  REGION 1..10: note = Table B: HLA-DQA1*03:01-B1*03:02L
  source 1..10: note = Severe acute respiratory syndrome coronavirus 2
GIAVEQDKNT

SEQ ID NO: 25153 - protein, 10 aa, Severe acute respiratory syndrome-related coronavirus
  REGION 1..10: note = Table B: HLA-DQA1*03:01-B1*03:02L
  source 1..10: note = Severe acute respiratory syndrome coronavirus 2
VFAQVKQIYK

SEQ ID NO: 25154 - protein, 10 aa, Severe acute respiratory syndrome-related coronavirus
  REGION 1..10: note = Table B: HLA-DQA1*03:01-B1*03:02L
  source 1..10: note = Severe acute respiratory syndrome coronavirus 2
FSQILPDPSK

SEQ ID NO: 25155 - protein, 11 aa, Severe acute respiratory syndrome-related coronavirus
  REGION 1..11: note = Table B: HLA-DQA1*03:01-B1*03:02L HLA-DQA1*01:03-B1*06:01L
  source 1..11: note = Severe acute respiratory syndrome coronavirus 2
LADAGFIKQYG

SEQ ID NO: 25156 - protein, 12 aa, Severe acute respiratory syndrome-related coronavirus
  REGION 1..12: note = Table B: HLA-DQA1*03:01-B1*03:02L
  source 1..12: note = Severe acute respiratory syndrome coronavirus 2
GDCLGDIAARDL

SEQ ID NO: 25157 - protein, 13 aa, Severe acute respiratory syndrome-related coronavirus
  REGION 1..13: note = Table B: HLA-DQA1*03:01-B1*03:02L
  source 1..13: note = Severe acute respiratory syndrome coronavirus 2
GDIAARDLICAQK

SEQ ID NO: 25158 - protein, 10 aa, Severe acute respiratory syndrome-related coronavirus
  REGION 1..10: note = Table B: HLA-DQA1*03:01-B1*03:02L
  source 1..10: note = Severe acute respiratory syndrome coronavirus 2
TVLPPLLTDE

SEQ ID NO: 25159 - protein, 10 aa, Severe acute respiratory syndrome-related coronavirus
  REGION 1..10: note = Table B: HLA-DQA1*03:01-B1*03:02L HLA-DQA1*01:03-B1*06:01L HLA-DQA1*02:01-B1*03:03L
  source 1..10: note = Severe acute respiratory syndrome coronavirus 2
AALQIPFAMQ

SEQ ID NO: 25160 - protein, 10 aa, Severe acute respiratory syndrome-related coronavirus
  REGION 1..10: note = Table B: HLA-DQA1*03:01-B1*03:02L
  source 1..10: note = Severe acute respiratory syndrome coronavirus 2
IPFAMQMAYR

SEQ ID NO: 25161 - protein, 10 aa, Severe acute respiratory syndrome-related coronavirus
  REGION 1..10: note = Table B: HLA-DQA1*03:01-B1*03:02L HLA-DQA1*02:01-B1*03:03L
  source 1..10: note = Severe acute respiratory syndrome coronavirus 2
TQNVLYENQK

SEQ ID NO: 25162 - protein, 10 aa, Severe acute respiratory syndrome-related coronavirus
  REGION 1..10: note = Table B: HLA-DQA1*03:01-B1*03:02L
  source 1..10: note = Severe acute respiratory syndrome coronavirus 2
ANQFNSAIGK

SEQ ID NO: 25163 - protein, 10 aa, Severe acute respiratory syndrome-related coronavirus
  REGION 1..10: note = Table B: HLA-DQA1*03:01-B1*03:02L
  source 1..10: note = Severe acute respiratory syndrome coronavirus 2
RLDKVEAEVQ

SEQ ID NO: 25164 - protein, 11 aa, Severe acute respiratory syndrome-related coronavirus
  REGION 1..11: note = Table B: HLA-DQA1*03:01-B1*03:02L
  source 1..11: note = Severe acute respiratory syndrome coronavirus 2
LDKVEAEVQID

SEQ ID NO: 25165 - protein, 10 aa, Severe acute respiratory syndrome-related coronavirus
  REGION 1..10: note = Table B: HLA-DQA1*03:01-B1*03:02L HLA-DQA1*02:01-B1*03:03L
  source 1..10: note = Severe acute respiratory syndrome coronavirus 2
KVEAEVQIDR

SEQ ID NO: 25166 - protein, 10 aa, Severe acute respiratory syndrome-related coronavirus
  REGION 1..10: note = Table B: HLA-DQA1*03:01-B1*03:02L HLA-DQA1*02:01-B1*03:03L
  source 1..10: note = Severe acute respiratory syndrome coronavirus 2
EVQIDRLITG

SEQ ID NO: 25167 - protein, 10 aa, Severe acute respiratory syndrome-related coronavirus
  REGION 1..10: note = Table B: HLA-DQA1*03:01-B1*03:02L HLA-DQA1*02:01-B1*03:03L
  source 1..10: note = Severe acute respiratory syndrome coronavirus 2
IDRLITGRLQ

SEQ ID NO: 25168 - protein, 11 aa, Severe acute respiratory syndrome-related coronavirus
  REGION 1..11: note = Table B: HLA-DQA1*03:01-B1*03:02L HLA-DQA1*01:03-B1*06:01L HLA-DQA1*02:01-B1*03:03L
  source 1..11: note = Severe acute respiratory syndrome coronavirus 2
TQQLIRAAEIR

SEQ ID NO: 25169 - protein, 10 aa, Severe acute respiratory syndrome-related coronavirus
  REGION 1..10: note = Table B: HLA-DQA1*03:01-B1*03:02L HLA-DQA1*02:01-B1*03:03L
  source 1..10: note = Severe acute respiratory syndrome coronavirus 2
DGKAHFPREG

SEQ ID NO: 25170 - protein, 10 aa, Severe acute respiratory syndrome-related coronavirus
  REGION 1..10: note = Table B: HLA-DQA1*03:01-B1*03:02L HLA-DQA1*02:01-B1*03:03L
  source 1..10: note = Severe acute respiratory syndrome coronavirus 2
EGVFVSNGTH

SEQ ID NO: 25171 - protein, 10 aa, Severe acute respiratory syndrome-related coronavirus
  REGION 1..10: note = Table B: HLA-DQA1*03:01-B1*03:02L
  source 1..10: note = Severe acute respiratory syndrome coronavirus 2
NGTHWFVTQR

SEQ ID NO: 25172 - protein, 10 aa, Severe acute respiratory syndrome-related coronavirus
  REGION 1..10: note = Table B: HLA-DQA1*03:01-B1*03:02L
  source 1..10: note = Severe acute respiratory syndrome coronavirus 2
YEPQIITTDN

SEQ ID NO: 25173 - protein, 11 aa, Severe acute respiratory syndrome-related coronavirus
  REGION 1..11: note = Table B: HLA-DQA1*03:01-B1*03:02L
  source 1..11: note = Severe acute respiratory syndrome coronavirus 2
DKYFKNHTSPD

SEQ ID NO: 25174 - protein, 12 aa, Severe acute respiratory syndrome-related coronavirus
  REGION 1..12: note = Table B: HLA-DQA1*03:01-B1*03:02L
  source 1..12: note = Severe acute respiratory syndrome coronavirus 2
HTSPDVDLGDIS

SEQ ID NO: 25175 - protein, 10 aa, Severe acute respiratory syndrome-related coronavirus
  REGION 1..10: note = Table B: HLA-DQA1*03:01-B1*03:02L
  source 1..10: note = Severe acute respiratory syndrome coronavirus 2
RLNEVAKNLN

SEQ ID NO: 25176 - protein, 11 aa, Severe acute respiratory syndrome-related coronavirus
  REGION 1..11: note = Table B: HLA-DQA1*03:01-B1*03:02L
  source 1..11: note = Severe acute respiratory syndrome coronavirus 2
VAKNLNESLID

SEQ ID NO: 25177 - protein, 10 aa, Severe acute respiratory syndrome-related coronavirus
  REGION 1..10: note = Table B: HLA-DQA1*03:01-B1*03:02L
  source 1..10: note = Severe acute respiratory syndrome coronavirus 2
IDLQELGKYE

SEQ ID NO: 25178 - protein, 10 aa, Severe acute respiratory syndrome-related coronavirus
  REGION 1..10: note = Table B: HLA-DQA1*03:01-B1*03:02L HLA-DQA1*02:01-B1*03:03L
  source 1..10: note = Severe acute respiratory syndrome coronavirus 2
DSEPVLKGVK

SEQ ID NO: 25179 - protein, 10 aa, Severe acute respiratory syndrome-related coronavirus
  REGION 1..10: note = Table B: HLA-DQA1*03:01-B1*03:02L
  source 1..10: note = Severe acute respiratory syndrome coronavirus 2
VTLKQGEIKD

SEQ ID NO: 25180 - protein, 10 aa, Severe acute respiratory syndrome-related coronavirus
  REGION 1..10: note = Table B: HLA-DQA1*03:01-B1*03:02L
  source 1..10: note = Severe acute respiratory syndrome coronavirus 2
KDATPSDFVR

SEQ ID NO: 25181 - protein, 10 aa, Severe acute respiratory syndrome-related coronavirus
  REGION 1..10: note = Table B: HLA-DQA1*03:01-B1*03:02L HLA-DQA1*01:03-B1*06:01L HLA-DQA1*02:01-B1*03:03L
  source 1..10: note = Severe acute respiratory syndrome coronavirus 2
ATPSDFVRAT

SEQ ID NO: 25182 - protein, 10 aa, Severe acute respiratory syndrome-related coronavirus
  REGION 1..10: note = Table B: HLA-DQA1*03:01-B1*03:02L
  source 1..10: note = Severe acute respiratory syndrome coronavirus 2
IPIQASLPFG

SEQ ID NO: 25183 - protein, 10 aa, Severe acute respiratory syndrome-related coronavirus
  REGION 1..10: note = Table B: HLA-DQA1*03:01-B1*03:02L
  source 1..10: note = Severe acute respiratory syndrome coronavirus 2
ASKIITLKKR

SEQ ID NO: 25184 - protein, 12 aa, Severe acute respiratory syndrome-related coronavirus
  REGION 1..12: note = Table B: HLA-DQA1*03:01-B1*03:02L
  source 1..12: note = Severe acute respiratory syndrome coronavirus 2
SKNPLLYDANYF

SEQ ID NO: 25185 - protein, 11 aa, Severe acute respiratory syndrome-related coronavirus
  REGION 1..11: note = Table B: HLA-DQA1*03:01-B1*03:02L
  source 1..11: note = Severe acute respiratory syndrome coronavirus 2
GYTEKWESGVK

SEQ ID NO: 25186 - protein, 11 aa, Severe acute respiratory syndrome-related coronavirus
  REGION 1..11: note = Table B: HLA-DQA1*03:01-B1*03:02L HLA-DQA1*01:03-B1*06:01L HLA-DQA1*02:01-B1*03:03L
  source 1..11: note = Severe acute respiratory syndrome coronavirus 2
LYSTQLSTDTG

SEQ ID NO: 25187 - protein, 10 aa, Severe acute respiratory syndrome-related coronavirus
  REGION 1..10: note = Table B: HLA-DQA1*03:01-B1*03:02L
  source 1..10: note = Severe acute respiratory syndrome coronavirus 2
EHVTFFIYNK

SEQ ID NO: 25188 - protein, 12 aa, Severe acute respiratory syndrome-related coronavirus
  REGION 1..12: note = Table B: HLA-DQA1*03:01-B1*03:02L
  source 1..12: note = Severe acute respiratory syndrome coronavirus 2
VDEPEEHVQIHT

SEQ ID NO: 25189 - protein, 10 aa, Severe acute respiratory syndrome-related coronavirus
  REGION 1..10: note = Table B: HLA-DQA1*03:01-B1*03:02L
  source 1..10: note = Severe acute respiratory syndrome coronavirus 2
EHVQIHTIDG

SEQ ID NO: 25190 - protein, 11 aa, Severe acute respiratory syndrome-related coronavirus
  REGION 1..11: note = Table B: HLA-DQA1*03:01-B1*03:02L
  source 1..11: note = Severe acute respiratory syndrome coronavirus 2
SSGVVNPVMEP

SEQ ID NO: 25191 - protein, 11 aa, Severe acute respiratory syndrome-related coronavirus
  REGION 1..11: note = Table B: HLA-DQA1*03:01-B1*03:02L
  source 1..11: note = Severe acute respiratory syndrome coronavirus 2
VVNPVMEPIYD

SEQ ID NO: 25192 - protein, 11 aa, Severe acute respiratory syndrome-related coronavirus
  REGION 1..11: note = Table B: HLA-DQA1*03:01-B1*03:02L HLA-DPA1*01:02-B1*04:01L
  source 1..11: note = Severe acute respiratory syndrome coronavirus 2
LVKPSFYVYSR

SEQ ID NO: 25193 - protein, 10 aa, Severe acute respiratory syndrome-related coronavirus
  REGION 1..10: note = Table B: HLA-DQA1*03:01-B1*03:02L
  source 1..10: note = Severe acute respiratory syndrome coronavirus 2
SRVKNLNSSR

SEQ ID NO: 25194 - protein, 10 aa, Severe acute respiratory syndrome-related coronavirus
  REGION 1..10: note = Table B: HLA-DQA1*03:01-B1*03:02L
  source 1..10: note = Severe acute respiratory syndrome coronavirus 2
ASFRLFARTR

SEQ ID NO: 25195 - protein, 10 aa, Severe acute respiratory syndrome-related coronavirus
  REGION 1..10: note = Table B: HLA-DQA1*03:01-B1*03:02L HLA-DQA1*01:03-B1*06:01L HLA-DQA1*02:01-B1*03:03L
  source 1..10: note = Severe acute respiratory syndrome coronavirus 2
GAVILRGHLR

SEQ ID NO: 25196 - protein, 10 aa, Severe acute respiratory syndrome-related coronavirus
  REGION 1..10: note = Table B: HLA-DQA1*03:01-B1*03:02L
  source 1..10: note = Severe acute respiratory syndrome coronavirus 2
PKEITVATSR

SEQ ID NO: 25197 - protein, 10 aa, Severe acute respiratory syndrome-related coronavirus
  REGION 1..10: note = Table B: HLA-DQA1*03:01-B1*03:02L
  source 1..10: note = Severe acute respiratory syndrome coronavirus 2
ATSRTLSYYK

SEQ ID NO: 25198 - protein, 10 aa, Severe acute respiratory syndrome-related coronavirus
  REGION 1..10: note = Table B: HLA-DQA1*03:01-B1*03:02L
  source 1..10: note = Severe acute respiratory syndrome coronavirus 2
ASQRVAGDSG

SEQ ID NO: 25199 - protein, 10 aa, Severe acute respiratory syndrome-related coronavirus
  REGION 1..10: note = Table B: HLA-DQA1*03:01-B1*03:02L HLA-DQA1*02:01-B1*03:03L
  source 1..10: note = Severe acute respiratory syndrome coronavirus 2
GDSGFAAYSR

SEQ ID NO: 25200 - protein, 10 aa, Severe acute respiratory syndrome-related coronavirus
  REGION 1..10: note = Table B: HLA-DQA1*03:01-B1*03:02L
  source 1..10: note = Severe acute respiratory syndrome coronavirus 2
IGNYKLNTDH

SEQ ID NO: 25201 - protein, 10 aa, Severe acute respiratory syndrome-related coronavirus
  REGION 1..10: note = Table B: HLA-DQA1*03:01-B1*03:02L
  source 1..10: note = Severe acute respiratory syndrome coronavirus 2
NLSKSLTENK

SEQ ID NO: 25202 - protein, 12 aa, Severe acute respiratory syndrome-related coronavirus
  REGION 1..12: note = Table B: HLA-DQA1*03:01-B1*03:02L
  source 1..12: note = Severe acute respiratory syndrome coronavirus 2
LSKSLTENKYSQ

SEQ ID NO: 25203 - protein, 12 aa, Severe acute respiratory syndrome-related coronavirus
  REGION 1..12: note = Table B: HLA-DQA1*03:01-B1*03:02L
  source 1..12: note = Severe acute respiratory syndrome coronavirus 2
TENKYSQLDEEQ

SEQ ID NO: 25204 - protein, 10 aa, Severe acute respiratory syndrome-related coronavirus
  REGION 1..10: note = Table B: HLA-DQA1*03:01-B1*03:02L
  source 1..10: note = Severe acute respiratory syndrome coronavirus 2
GTYEGNSPFH

SEQ ID NO: 25205 - protein, 10 aa, Severe acute respiratory syndrome-related coronavirus
  REGION 1..10: note = Table B: HLA-DQA1*03:01-B1*03:02L HLA-DQA1*02:01-B1*03:03L
  source 1..10: note = Severe acute respiratory syndrome coronavirus 2
NSPFHPLADN

SEQ ID NO: 25206 - protein, 11 aa, Severe acute respiratory syndrome-related coronavirus
  REGION 1..11: note = Table B: HLA-DQA1*03:01-B1*03:02L
  source 1..11: note = Severe acute respiratory syndrome coronavirus 2
PFHPLADNKFA

SEQ ID NO: 25207 - protein, 13 aa, Severe acute respiratory syndrome-related coronavirus
  REGION 1..13: note = Table B: HLA-DQA1*03:01-B1*03:02L HLA-DQA1*02:01-B1*03:03L
  source 1..13: note = Severe acute respiratory syndrome coronavirus 2
YSKWYIRVGARKS

SEQ ID NO: 25208 - protein, 11 aa, Severe acute respiratory syndrome-related coronavirus
  REGION 1..11: note = Table B: HLA-DQA1*03:01-B1*03:02L
  source 1..11: note = Severe acute respiratory syndrome coronavirus 2
VGARKSAPLIE

SEQ ID NO: 25209 - protein, 12 aa, Severe acute respiratory syndrome-related coronavirus
  REGION 1..12: note = Table B: HLA-DQA1*03:01-B1*03:02L
  source 1..12: note = Severe acute respiratory syndrome coronavirus 2
GSKSPIQYIDIG

SEQ ID NO: 25210 - protein, 12 aa, Severe acute respiratory syndrome-related coronavirus
  REGION 1..12: note = Table B: HLA-DQA1*03:01-B1*03:02L HLA-DQA1*02:01-B1*03:03L
  source 1..12: note = Severe acute respiratory syndrome coronavirus 2
SKSPIQYIDIGN

SEQ ID NO: 25211 - protein, 12 aa, Severe acute respiratory syndrome-related coronavirus
  REGION 1..12: note = Table B: HLA-DQA1*03:01-B1*03:02L
  source 1..12: note = Severe acute respiratory syndrome coronavirus 2
SDNGPQNQRNAP

SEQ ID NO: 25212 - protein, 13 aa, Severe acute respiratory syndrome-related coronavirus
  REGION 1..13: note = Table B: HLA-DQA1*03:01-B1*03:02L
  source 1..13: note = Severe acute respiratory syndrome coronavirus 2
FGGPSDSTGSNQN

SEQ ID NO: 25213 - protein, 11 aa, Severe acute respiratory syndrome-related coronavirus
  REGION 1..11: note = Table B: HLA-DQA1*03:01-B1*03:02L
  source 1..11: note = Severe acute respiratory syndrome coronavirus 2
GERSGARSKQR

SEQ ID NO: 25214 - protein, 14 aa, Severe acute respiratory syndrome-related coronavirus
  REGION 1..14: note = Table B: HLA-DQA1*03:01-B1*03:02L
  source 1..14: note = Severe acute respiratory syndrome coronavirus 2
LPNNTASWFTALTQ

SEQ ID NO: 25215 - protein, 13 aa, Severe acute respiratory syndrome-related coronavirus
  REGION 1..13: note = Table B: HLA-DQA1*03:01-B1*03:02L
  source 1..13: note = Severe acute respiratory syndrome coronavirus 2
TQHGKEDLKFPRG

SEQ ID NO: 25216 - protein, 13 aa, Severe acute respiratory syndrome-related coronavirus
  REGION 1..13: note = Table B: HLA-DQA1*03:01-B1*03:02L HLA-DRB1*14:17L
  source 1..13: note = Severe acute respiratory syndrome coronavirus 2
GQGVPINTNSSPD

SEQ ID NO: 25217 - protein, 11 aa, Severe acute respiratory syndrome-related coronavirus
  REGION 1..11: note = Table B: HLA-DQA1*03:01-B1*03:02L
  source 1..11: note = Severe acute respiratory syndrome coronavirus 2
DQIGYYRRATR

SEQ ID NO: 25218 - protein, 10 aa, Severe acute respiratory syndrome-related coronavirus
  REGION 1..10: note = Table B: HLA-DQA1*03:01-B1*03:02L
  source 1..10: note = Severe acute respiratory syndrome coronavirus 2
RIRGGDGKMK

SEQ ID NO: 25219 - protein, 11 aa, Severe acute respiratory syndrome-related coronavirus
  REGION 1..11: note = Table B: HLA-DQA1*03:01-B1*03:02L
  source 1..11: note = Severe acute respiratory syndrome coronavirus 2
GTGPEAGLPYG

SEQ ID NO: 25220 - protein, 11 aa, Severe acute respiratory syndrome-related coronavirus
  REGION 1..11: note = Table B: HLA-DQA1*03:01-B1*03:02L
  source 1..11: note = Severe acute respiratory syndrome coronavirus 2
PEAGLPYGANK

SEQ ID NO: 25221 - protein, 10 aa, Severe acute respiratory syndrome-related coronavirus
  REGION 1..10: note = Table B: HLA-DQA1*03:01-B1*03:02L
  source 1..10: note = Severe acute respiratory syndrome coronavirus 2
NTPKDHIGTR

SEQ ID NO: 25222 - protein, 12 aa, Severe acute respiratory syndrome-related coronavirus
  REGION 1..12: note = Table B: HLA-DQA1*03:01-B1*03:02L
  source 1..12: note = Severe acute respiratory syndrome coronavirus 2
TPKDHIGTRNPA

SEQ ID NO: 25223 - protein, 10 aa, Severe acute respiratory syndrome-related coronavirus
  REGION 1..10: note = Table B: HLA-DQA1*03:01-B1*03:02L
  source 1..10: note = Severe acute respiratory syndrome coronavirus 2
DHIGTRNPAN

SEQ ID NO: 25224 - protein, 12 aa, Severe acute respiratory syndrome-related coronavirus
  REGION 1..12: note = Table B: HLA-DQA1*03:01-B1*03:02L
  source 1..12: note = Severe acute respiratory syndrome coronavirus 2
RNPANNAAIVLQ

SEQ ID NO: 25225 - protein, 11 aa, Severe acute respiratory syndrome-related coronavirus
  REGION 1..11: note = Table B: HLA-DQA1*03:01-B1*03:02L
  source 1..11: note = Severe acute respiratory syndrome coronavirus 2
LPKGFYAEGSR

SEQ ID NO: 25226 - protein, 10 aa, Severe acute respiratory syndrome-related coronavirus
  REGION 1..10: note = Table B: HLA-DQA1*03:01-B1*03:02L
  source 1..10: note = Severe acute respiratory syndrome coronavirus 2
SRGGSQASSR

SEQ ID NO: 25227 - protein, 10 aa, Severe acute respiratory syndrome-related coronavirus
  REGION 1..10: note = Table B: HLA-DQA1*03:01-B1*03:02L
  source 1..10: note = Severe acute respiratory syndrome coronavirus 2
SQASSRSSSR

SEQ ID NO: 25228 - protein, 10 aa, Severe acute respiratory syndrome-related coronavirus
  REGION 1..10: note = Table B: HLA-DQA1*03:01-B1*03:02L
  source 1..10: note = Severe acute respiratory syndrome coronavirus 2
GSSRGTSPAR

SEQ ID NO: 25229 - protein, 10 aa, Severe acute respiratory syndrome-related coronavirus
  REGION 1..10: note = Table B: HLA-DQA1*03:01-B1*03:02L
  source 1..10: note = Severe acute respiratory syndrome coronavirus 2
NQLESKMSGK

SEQ ID NO: 25230 - protein, 12 aa, Severe acute respiratory syndrome-related coronavirus
  REGION 1..12: note = Table B: HLA-DQA1*03:01-B1*03:02L
  source 1..12: note = Severe acute respiratory syndrome coronavirus 2
GKGQQQQGQTVT

SEQ ID NO: 25231 - protein, 11 aa, Severe acute respiratory syndrome-related coronavirus
  REGION 1..11: note = Table B: HLA-DQA1*03:01-B1*03:02L
  source 1..11: note = Severe acute respiratory syndrome coronavirus 2
VTKKSAAEASK

SEQ ID NO: 25232 - protein, 12 aa, Severe acute respiratory syndrome-related coronavirus
  REGION 1..12: note = Table B: HLA-DQA1*03:01-B1*03:02L
  source 1..12: note = Severe acute respiratory syndrome coronavirus 2
TKKSAAEASKKP

SEQ ID NO: 25233 - protein, 10 aa, Severe acute respiratory syndrome-related coronavirus
  REGION 1..10: note = Table B: HLA-DQA1*03:01-B1*03:02L
  source 1..10: note = Severe acute respiratory syndrome coronavirus 2
AAEASKKPRQ

SEQ ID NO: 25234 - protein, 10 aa, Severe acute respiratory syndrome-related coronavirus
  REGION 1..10: note = Table B: HLA-DQA1*03:01-B1*03:02L
  source 1..10: note = Severe acute respiratory syndrome coronavirus 2
DQELIRQGTD

SEQ ID NO: 25235 - protein, 13 aa, Severe acute respiratory syndrome-related coronavirus
  REGION 1..13: note = Table B: HLA-DQA1*03:01-B1*03:02L
  source 1..13: note = Severe acute respiratory syndrome coronavirus 2
FGMSRIGMEVTPS

SEQ ID NO: 25236 - protein, 10 aa, Severe acute respiratory syndrome-related coronavirus
  REGION 1..10: note = Table B: HLA-DQA1*03:01-B1*03:02L
  source 1..10: note = Severe acute respiratory syndrome coronavirus 2
KLDDKDPNFK

SEQ ID NO: 25237 - protein, 10 aa, Severe acute respiratory syndrome-related coronavirus
  REGION 1..10: note = Table B: HLA-DQA1*03:01-B1*03:02L
  source 1..10: note = Severe acute respiratory syndrome coronavirus 2
DDKDPNFKDQ

SEQ ID NO: 25238 - protein, 10 aa, Severe acute respiratory syndrome-related coronavirus
  REGION 1..10: note = Table B: HLA-DQA1*03:01-B1*03:02L
  source 1..10: note = Severe acute respiratory syndrome coronavirus 2
QVILLNKHID

SEQ ID NO: 25239 - protein, 10 aa, Severe acute respiratory syndrome-related coronavirus
  REGION 1..10: note = Table B: HLA-DQA1*03:01-B1*03:02L
  source 1..10: note = Severe acute respiratory syndrome coronavirus 2
TFPPTEPKKD

SEQ ID NO: 25240 - protein, 10 aa, Severe acute respiratory syndrome-related coronavirus
  REGION 1..10: note = Table B: HLA-DQA1*03:01-B1*03:02L
  source 1..10: note = Severe acute respiratory syndrome coronavirus 2
FPPTEPKKDK

SEQ ID NO: 25241 - protein, 10 aa, Severe acute respiratory syndrome-related coronavirus
  REGION 1..10: note = Table B: HLA-DQA1*03:01-B1*03:02L
  source 1..10: note = Severe acute respiratory syndrome coronavirus 2
VTLLPAADLD

SEQ ID NO: 25242 - protein, 10 aa, Severe acute respiratory syndrome-related coronavirus
  REGION 1..10: note = Table B: HLA-DQA1*03:01-B1*03:02L
  source 1..10: note = Severe acute respiratory syndrome coronavirus 2
TLLPAADLDD

SEQ ID NO: 25243 - protein, 12 aa, Severe acute respiratory syndrome-related coronavirus
  REGION 1..12: note = Table B: HLA-DQA1*03:01-B1*03:02L
  source 1..12: note = Severe acute respiratory syndrome coronavirus 2
LQQSMSSADSTQ

SEQ ID NO: 25244 - protein, 12 aa, Severe acute respiratory syndrome-related coronavirus
  REGION 1..12: note = Table B: HLA-DRB1*14:54L
  source 1..12: note = Severe acute respiratory syndrome coronavirus 2
DSIIIGGAKLKA

SEQ ID NO: 25245 - protein, 13 aa, Severe acute respiratory syndrome-related coronavirus
  REGION 1..13: note = Table B: HLA-DRB1*14:54L
  source 1..13: note = Severe acute respiratory syndrome coronavirus 2
GGGVAGALNKATN

SEQ ID NO: 25246 - protein, 12 aa, Severe acute respiratory syndrome-related coronavirus
  REGION 1..12: note = Table B: HLA-DRB1*14:54L
  source 1..12: note = Severe acute respiratory syndrome coronavirus 2
EQKIAEIPKEEV

SEQ ID NO: 25247 - protein, 12 aa, Severe acute respiratory syndrome-related coronavirus
  REGION 1..12: note = Table B: HLA-DRB1*14:54L HLA-DRB1*16:01L
  source 1..12: note = Severe acute respiratory syndrome coronavirus 2
ASLINTLNDLNE

SEQ ID NO: 25248 - protein, 12 aa, Severe acute respiratory syndrome-related coronavirus
  REGION 1..12: note = Table B: HLA-DRB1*14:54L
  source 1..12: note = Severe acute respiratory syndrome coronavirus 2
NAQVAKSHNIAL

SEQ ID NO: 25249 - protein, 11 aa, Severe acute respiratory syndrome-related coronavirus
  REGION 1..11: note = Table B: HLA-DRB1*14:54L
  source 1..11: note = Severe acute respiratory syndrome coronavirus 2
VLTLDNQDLNG

SEQ ID NO: 25250 - protein, 15 aa, Severe acute respiratory syndrome-related coronavirus
  REGION 1..15: note = Table B: HLA-DRB1*14:54L
  source 1..15: note = Severe acute respiratory syndrome coronavirus 2
YDYYRYNLPTMCDIR

SEQ ID NO: 25251 - protein, 11 aa, Severe acute respiratory syndrome-related coronavirus
  REGION 1..11: note = Table B: HLA-DRB1*14:54L
  source 1..11: note = Severe acute respiratory syndrome coronavirus 2
TVVIGTSKFYG

SEQ ID NO: 25252 - protein, 13 aa, Severe acute respiratory syndrome-related coronavirus
  REGION 1..13: note = Table B: HLA-DRB1*14:54L
  source 1..13: note = Severe acute respiratory syndrome coronavirus 2
GSLYVKPGGTSSG

SEQ ID NO: 25253 - protein, 11 aa, Severe acute respiratory syndrome-related coronavirus
  REGION 1..11: note = Table B: HLA-DRB1*14:54L
  source 1..11: note = Severe acute respiratory syndrome coronavirus 2
HVISTSHKLVL

SEQ ID NO: 25254 - protein, 11 aa, Severe acute respiratory syndrome-related coronavirus
  REGION 1..11: note = Table B: HLA-DRB1*14:54L
  source 1..11: note = Severe acute respiratory syndrome coronavirus 2
VISTSHKLVLS

SEQ ID NO: 25255 - protein, 11 aa, Severe acute respiratory syndrome-related coronavirus
  REGION 1..11: note = Table B: HLA-DRB1*14:54L
  source 1..11: note = Severe acute respiratory syndrome coronavirus 2
SALVYDNKLKA

SEQ ID NO: 25256 - protein, 13 aa, Severe acute respiratory syndrome-related coronavirus
  REGION 1..13: note = Table B: HLA-DRB1*14:54L
  source 1..13: note = Severe acute respiratory syndrome coronavirus 2
VDGVVQQLPETYF

SEQ ID NO: 25257 - protein, 12 aa, Severe acute respiratory syndrome-related coronavirus
  REGION 1..12: note = Table B: HLA-DRB1*14:54L
  source 1..12: note = Severe acute respiratory syndrome coronavirus 2
GVVQQLPETYFT

SEQ ID NO: 25258 - protein, 12 aa, Severe acute respiratory syndrome-related coronavirus
  REGION 1..12: note = Table B: HLA-DRB1*14:54L
  source 1..12: note = Severe acute respiratory syndrome coronavirus 2
TGVLTESNKKFL

SEQ ID NO: 25259 - protein, 12 aa, Severe acute respiratory syndrome-related coronavirus
  REGION 1..12: note = Table B: HLA-DRB1*14:54L
  source 1..12: note = Severe acute respiratory syndrome coronavirus 2
ADQLTPTWRVYS

SEQ ID NO: 25260 - protein, 12 aa, Severe acute respiratory syndrome-related coronavirus
  REGION 1..12: note = Table B: HLA-DRB1*14:54L
  source 1..12: note = Severe acute respiratory syndrome coronavirus 2
QEVFAQVKQIYK

SEQ ID NO: 25261 - protein, 12 aa, Severe acute respiratory syndrome-related coronavirus
  REGION 1..12: note = Table B: HLA-DRB1*14:54L
  source 1..12: note = Severe acute respiratory syndrome coronavirus 2
NGIGVTQNVLYE

SEQ ID NO: 25262 - protein, 12 aa, Severe acute respiratory syndrome-related coronavirus
  REGION 1..12: note = Table B: HLA-DRB1*14:54L
  source 1..12: note = Severe acute respiratory syndrome coronavirus 2
AQALNTLVKQLS

SEQ ID NO: 25263 - protein, 14 aa, Severe acute respiratory syndrome-related coronavirus
  REGION 1..14: note = Table B: HLA-DPA1*01:03-B1*02:01L
  source 1..14: note = Severe acute respiratory syndrome coronavirus 2
FKLVNKFLALCADS

SEQ ID NO: 25264 - protein, 17 aa, Severe acute respiratory syndrome-related coronavirus
  REGION 1..17: note = Table B: HLA-DPA1*01:03-B1*02:01L HLA-DRB1*04:08L
  source 1..17: note = Severe acute respiratory syndrome coronavirus 2
TPVCINGLMLLEIKDTE

SEQ ID NO: 25265 - protein, 16 aa, Severe acute respiratory syndrome-related coronavirus
  REGION 1..16: note = Table B: HLA-DPA1*01:03-B1*02:01L
  source 1..16: note = Severe acute respiratory syndrome coronavirus 2
APNMMVTNNTFTLKGG

SEQ ID NO: 25266 - protein, 19 aa, Severe acute respiratory syndrome-related coronavirus
  REGION 1..19: note = Table B: HLA-DPA1*01:03-B1*02:01L
  source 1..19: note = Severe acute respiratory syndrome coronavirus 2
VKPTVVVNAANVYLKHGGG

SEQ ID NO: 25267 - protein, 16 aa, Severe acute respiratory syndrome-related coronavirus
  REGION 1..16: note = Table B: HLA-DPA1*01:03-B1*02:01L
  source 1..16: note = Severe acute respiratory syndrome coronavirus 2
LAPLLSAGIFGADPIH

SEQ ID NO: 25268 - protein, 16 aa, Severe acute respiratory syndrome-related coronavirus
  REGION 1..16: note = Table B: HLA-DPA1*01:03-B1*02:01L
  source 1..16: note = Severe acute respiratory syndrome coronavirus 2
APLLSAGIFGADPIHS

SEQ ID NO: 25269 - protein, 14 aa, Severe acute respiratory syndrome-related coronavirus
  REGION 1..14: note = Table B: HLA-DPA1*01:03-B1*02:01L
  source 1..14: note = Severe acute respiratory syndrome coronavirus 2
AVFDKNLYDKLVSS

SEQ ID NO: 25270 - protein, 14 aa, Severe acute respiratory syndrome-related coronavirus
  REGION 1..14: note = Table B: HLA-DPA1*01:03-B1*02:01L
  source 1..14: note = Severe acute respiratory syndrome coronavirus 2
YDKLVSSFLEMKSE

SEQ ID NO: 25271 - protein, 18 aa, Severe acute respiratory syndrome-related coronavirus
  REGION 1..18: note = Table B: HLA-DPA1*01:03-B1*02:01L
  source 1..18: note = Severe acute respiratory syndrome coronavirus 2
VVDYGARFYFYTSKTTVA

SEQ ID NO: 25272 - protein, 13 aa, Severe acute respiratory syndrome-related coronavirus
  REGION 1..13: note = Table B: HLA-DPA1*01:03-B1*02:01L HLA-DPA1*01:03-B1*104:01L
  source 1..13: note = Severe acute respiratory syndrome coronavirus 2
VFTTVDNINLHTQ

SEQ ID NO: 25273 - protein, 17 aa, Severe acute respiratory syndrome-related coronavirus
  REGION 1..17: note = Table B: HLA-DPA1*01:03-B1*02:01L
  source 1..17: note = Severe acute respiratory syndrome coronavirus 2
TALLTLQQIELKFNPPA

SEQ ID NO: 25274 - protein, 17 aa, Severe acute respiratory syndrome-related coronavirus
  REGION 1..17: note = Table B: HLA-DPA1*01:03-B1*02:01L
  source 1..17: note = Severe acute respiratory syndrome coronavirus 2
GVEAVMYMGTLSYEQFK

SEQ ID NO: 25275 - protein, 12 aa, Severe acute respiratory syndrome-related coronavirus
  REGION 1..12: note = Table B: HLA-DPA1*01:03-B1*02:01L
  source 1..12: note = Severe acute respiratory syndrome coronavirus 2
SYTTTIKPVTYK

SEQ ID NO: 25276 - protein, 19 aa, Severe acute respiratory syndrome-related coronavirus
  REGION 1..19: note = Table B: HLA-DPA1*01:03-B1*02:01L
  source 1..19: note = Severe acute respiratory syndrome coronavirus 2
KPIVWHVNNATNKATYKPN

SEQ ID NO: 25277 - protein, 13 aa, Severe acute respiratory syndrome-related coronavirus
  REGION 1..13: note = Table B: HLA-DPA1*01:03-B1*02:01L
  source 1..13: note = Severe acute respiratory syndrome coronavirus 2
AYVDNSSLTIKKP

SEQ ID NO: 25278 - protein, 13 aa, Severe acute respiratory syndrome-related coronavirus
  REGION 1..13: note = Table B: HLA-DPA1*01:03-B1*02:01L
  source 1..13: note = Severe acute respiratory syndrome coronavirus 2
NKVVSTTTNIVTR

SEQ ID NO: 25279 - protein, 13 aa, Severe acute respiratory syndrome-related coronavirus
  REGION 1..13: note = Table B: HLA-DPA1*01:03-B1*02:01L
  source 1..13: note = Severe acute respiratory syndrome coronavirus 2
GGSYTNDKACPLI

SEQ ID NO: 25280 - protein, 15 aa, Severe acute respiratory syndrome-related coronavirus
  REGION 1..15: note = Table B: HLA-DPA1*01:03-B1*02:01L
  source 1..15: note = Severe acute respiratory syndrome coronavirus 2
AVNLLTNMFTPLIQP

SEQ ID NO: 25281 - protein, 14 aa, Severe acute respiratory syndrome-related coronavirus
  REGION 1..14: note = Table B: HLA-DPA1*01:03-B1*02:01L
  source 1..14: note = Severe acute respiratory syndrome coronavirus 2
FLLNKEMYLKLRSD

SEQ ID NO: 25282 - protein, 15 aa, Severe acute respiratory syndrome-related coronavirus
  REGION 1..15: note = Table B: HLA-DPA1*01:03-B1*02:01L
  source 1..15: note = Severe acute respiratory syndrome coronavirus 2
QSGFRKMAFPSGKVE

SEQ ID NO: 25283 - protein, 13 aa, Severe acute respiratory syndrome-related coronavirus
  REGION 1..13: note = Table B: HLA-DPA1*01:03-B1*02:01L
  source 1..13: note = Severe acute respiratory syndrome coronavirus 2
GDRWFLNRFTTTL

SEQ ID NO: 25284 - protein, 15 aa, Severe acute respiratory syndrome-related coronavirus
  REGION 1..15: note = Table B: HLA-DPA1*01:03-B1*02:01L
  source 1..15: note = Severe acute respiratory syndrome coronavirus 2
SALLEDEFTPFDVVR

SEQ ID NO: 25285 - protein, 19 aa, Severe acute respiratory syndrome-related coronavirus
  REGION 1..19: note = Table B: HLA-DPA1*01:03-B1*02:01L
  source 1..19: note = Severe acute respiratory syndrome coronavirus 2
DDGARRVWTLMNVLTLVYK

SEQ ID NO: 25286 - protein, 15 aa, Severe acute respiratory syndrome-related coronavirus
  REGION 1..15: note = Table B: HLA-DPA1*01:03-B1*02:01L
  source 1..15: note = Severe acute respiratory syndrome coronavirus 2
AAKLMVVIPDYNTYK

SEQ ID NO: 25287 - protein, 16 aa, Severe acute respiratory syndrome-related coronavirus
  REGION 1..16: note = Table B: HLA-DPA1*01:03-B1*02:01L
  source 1..16: note = Severe acute respiratory syndrome coronavirus 2
ANSAVKLQNNELSPVA

SEQ ID NO: 25288 - protein, 17 aa, Severe acute respiratory syndrome-related coronavirus
  REGION 1..17: note = Table B: HLA-DPA1*01:03-B1*02:01L HLA-DPA1*01:03-B1*104:01L
  source 1..17: note = Severe acute respiratory syndrome coronavirus 2
EERLKLFDRYFKYWDQT

SEQ ID NO: 25289 - protein, 16 aa, Severe acute respiratory syndrome-related coronavirus
  REGION 1..16: note = Table B: HLA-DPA1*01:03-B1*02:01L HLA-DPA1*01:03-B1*104:01L
  source 1..16: note = Severe acute respiratory syndrome coronavirus 2
FNVLFSTVFPPTSFGP

SEQ ID NO: 25290 - protein, 18 aa, Severe acute respiratory syndrome-related coronavirus
  REGION 1..18: note = Table B: HLA-DPA1*01:03-B1*02:01L
  source 1..18: note = Severe acute respiratory syndrome coronavirus 2
DGNAAISDYDYYRYNLPT

SEQ ID NO: 25291 - protein, 12 aa, Severe acute respiratory syndrome-related coronavirus
  REGION 1..12: note = Table B: HLA-DPA1*01:03-B1*02:01L HLA-DRB1*04:08L
  source 1..12: note = Severe acute respiratory syndrome coronavirus 2
AYANSVFNICQA

SEQ ID NO: 25292 - protein, 12 aa, Severe acute respiratory syndrome-related coronavirus
  REGION 1..12: note = Table B: HLA-DPA1*01:03-B1*02:01L
  source 1..12: note = Severe acute respiratory syndrome coronavirus 2
KLFAAETLKATE

SEQ ID NO: 25293 - protein, 12 aa, Severe acute respiratory syndrome-related coronavirus
  REGION 1..12: note = Table B: HLA-DPA1*01:03-B1*02:01L
  source 1..12: note = Severe acute respiratory syndrome coronavirus 2
NYVFTGYRVTKN

SEQ ID NO: 25294 - protein, 16 aa, Severe acute respiratory syndrome-related coronavirus
  REGION 1..16: note = Table B: HLA-DPA1*01:03-B1*02:01L
  source 1..16: note = Severe acute respiratory syndrome coronavirus 2
VFTGYRVTKNSKVQIG

SEQ ID NO: 25295 - protein, 14 aa, Severe acute respiratory syndrome-related coronavirus
  REGION 1..14: note = Table B: HLA-DPA1*01:03-B1*02:01L HLA-DRB1*16:01L HLA-DRB1*04:08L
  source 1..14: note = Severe acute respiratory syndrome coronavirus 2
KLNVGDYFVLTSHT

SEQ ID NO: 25296 - protein, 13 aa, Severe acute respiratory syndrome-related coronavirus
  REGION 1..13: note = Table B: HLA-DPA1*01:03-B1*02:01L
  source 1..13: note = Severe acute respiratory syndrome coronavirus 2
FAIGLALYYPSAR

SEQ ID NO: 25297 - protein, 15 aa, Severe acute respiratory syndrome-related coronavirus
  REGION 1..15: note = Table B: HLA-DPA1*01:03-B1*02:01L
  source 1..15: note = Severe acute respiratory syndrome coronavirus 2
VNSTLEQYVFCTVNA

SEQ ID NO: 25298 - protein, 12 aa, Severe acute respiratory syndrome-related coronavirus
  REGION 1..12: note = Table B: HLA-DPA1*01:03-B1*02:01L
  source 1..12: note = Severe acute respiratory syndrome coronavirus 2
TLEPEYFNSVCR

SEQ ID NO: 25299 - protein, 14 aa, Severe acute respiratory syndrome-related coronavirus
  REGION 1..14: note = Table B: HLA-DPA1*01:03-B1*02:01L HLA-DRB1*08:02L
  source 1..14: note = Severe acute respiratory syndrome coronavirus 2
YDYVIFTQTTETAH

SEQ ID NO: 25300 - protein, 13 aa, Severe acute respiratory syndrome-related coronavirus
  REGION 1..13: note = Table B: HLA-DPA1*01:03-B1*02:01L HLA-DPA1*01:02-B1*04:01L
  source 1..13: note = Severe acute respiratory syndrome coronavirus 2
YVIFTQTTETAHS

SEQ ID NO: 25301 - protein, 13 aa, Severe acute respiratory syndrome-related coronavirus
  REGION 1..13: note = Table B: HLA-DPA1*01:03-B1*02:01L
  source 1..13: note = Severe acute respiratory syndrome coronavirus 2
LELAMDEFIERYK

SEQ ID NO: 25302 - protein, 14 aa, Severe acute respiratory syndrome-related coronavirus
  REGION 1..14: note = Table B: HLA-DPA1*01:03-B1*02:01L
  source 1..14: note = Severe acute respiratory syndrome coronavirus 2
MDEFIERYKLEGYA

SEQ ID NO: 25303 - protein, 14 aa, Severe acute respiratory syndrome-related coronavirus
  REGION 1..14: note = Table B: HLA-DPA1*01:03-B1*02:01L
  source 1..14: note = Severe acute respiratory syndrome coronavirus 2
EISFMLWCKDGHVE

SEQ ID NO: 25304 - protein, 14 aa, Severe acute respiratory syndrome-related coronavirus
  REGION 1..14: note = Table B: HLA-DPA1*01:03-B1*02:01L
  source 1..14: note = Severe acute respiratory syndrome coronavirus 2
IFWRNTNPIQLSSY

SEQ ID NO: 25305 - protein, 16 aa, Severe acute respiratory syndrome-related coronavirus
  REGION 1..16: note = Table B: HLA-DPA1*01:03-B1*02:01L
  source 1..16: note = Severe acute respiratory syndrome coronavirus 2
LPFNDGVYFASTEKSN

SEQ ID NO: 25306 - protein, 13 aa, Severe acute respiratory syndrome-related coronavirus
  REGION 1..13: note = Table B: HLA-DPA1*01:03-B1*02:01L
  source 1..13: note = Severe acute respiratory syndrome coronavirus 2
KSWMESEFRVYSS

SEQ ID NO: 25307 - protein, 12 aa, Severe acute respiratory syndrome-related coronavirus
  REGION 1..12: note = Table B: HLA-DPA1*01:03-B1*02:01L
  source 1..12: note = Severe acute respiratory syndrome coronavirus 2
PIGINITRFQTL

SEQ ID NO: 25308 - protein, 13 aa, Severe acute respiratory syndrome-related coronavirus
  REGION 1..13: note = Table B: HLA-DPA1*01:03-B1*02:01L
  source 1..13: note = Severe acute respiratory syndrome coronavirus 2
SFTVEKGIYQTSN

SEQ ID NO: 25309 - protein, 13 aa, Severe acute respiratory syndrome-related coronavirus
  REGION 1..13: note = Table B: HLA-DPA1*01:03-B1*02:01L
  source 1..13: note = Severe acute respiratory syndrome coronavirus 2
KGIYQTSNFRVQP

SEQ ID NO: 25310 - protein, 15 aa, Severe acute respiratory syndrome-related coronavirus
  REGION 1..15: note = Table B: HLA-DPA1*01:03-B1*02:01L
  source 1..15: note = Severe acute respiratory syndrome coronavirus 2
NATRFASVYAWNRKR

SEQ ID NO: 25311 - protein, 17 aa, Severe acute respiratory syndrome-related coronavirus
  REGION 1..17: note = Table B: HLA-DPA1*01:03-B1*02:01L
  source 1..17: note = Severe acute respiratory syndrome coronavirus 2
AENSVAYSNNSIAIPTN

SEQ ID NO: 25312 - protein, 16 aa, Severe acute respiratory syndrome-related coronavirus
  REGION 1..16: note = Table B: HLA-DPA1*01:03-B1*02:01L HLA-DRB1*08:02L
  source 1..16: note = Severe acute respiratory syndrome coronavirus 2
DAGFIKQYGDCLGDIA

SEQ ID NO: 25313 - protein, 13 aa, Severe acute respiratory syndrome-related coronavirus
  REGION 1..13: note = Table B: HLA-DPA1*01:03-B1*02:01L
  source 1..13: note = Severe acute respiratory syndrome coronavirus 2
IDRLITGRLQSLQ

SEQ ID NO: 25314 - protein, 14 aa, Severe acute respiratory syndrome-related coronavirus
  REGION 1..14: note = Table B: HLA-DPA1*01:03-B1*02:01L
  source 1..14: note = Severe acute respiratory syndrome coronavirus 2
PLLYDANYFLCWHT

SEQ ID NO: 25315 - protein, 13 aa, Severe acute respiratory syndrome-related coronavirus
  REGION 1..13: note = Table B: HLA-DPA1*01:03-B1*02:01L HLA-DRB1*08:03L
  source 1..13: note = Severe acute respiratory syndrome coronavirus 2
FYVYSRVKNLNSS

SEQ ID NO: 25316 - protein, 14 aa, Severe acute respiratory syndrome-related coronavirus
  REGION 1..14: note = Table B: HLA-DPA1*01:03-B1*02:01L HLA-DRB1*15:03L
  source 1..14: note = Severe acute respiratory syndrome coronavirus 2
VGLMWLSYFIASFR

SEQ ID NO: 25317 - protein, 14 aa, Severe acute respiratory syndrome-related coronavirus
  REGION 1..14: note = Table B: HLA-DPA1*01:03-B1*02:01L
  source 1..14: note = Severe acute respiratory syndrome coronavirus 2
VQELYSPIFLIVAA

SEQ ID NO: 25318 - protein, 15 aa, Severe acute respiratory syndrome-related coronavirus
  REGION 1..15: note = Table B: HLA-DPA1*01:03-B1*02:01L
  source 1..15: note = Severe acute respiratory syndrome coronavirus 2
GIIWVATEGALNTPK

SEQ ID NO: 25319 - protein, 17 aa, Severe acute respiratory syndrome-related coronavirus
  REGION 1..17: note = Table B: HLA-DPA1*01:03-B1*104:01L
  source 1..17: note = Severe acute respiratory syndrome coronavirus 2
LPVLQVRDVLVRGFGDS

SEQ ID NO: 25320 - protein, 16 aa, Severe acute respiratory syndrome-related coronavirus
  REGION 1..16: note = Table B: HLA-DPA1*01:03-B1*104:01L
  source 1..16: note = Severe acute respiratory syndrome coronavirus 2
SVEEVLSEARQHLKDG

SEQ ID NO: 25321 - protein, 13 aa, Severe acute respiratory syndrome-related coronavirus
  REGION 1..13: note = Table B: HLA-DPA1*01:03-B1*104:01L
  source 1..13: note = Severe acute respiratory syndrome coronavirus 2
LEGIQYGRSGETL

SEQ ID NO: 25322 - protein, 16 aa, Severe acute respiratory syndrome-related coronavirus
  REGION 1..16: note = Table B: HLA-DPA1*01:03-B1*104:01L
  source 1..16: note = Severe acute respiratory syndrome coronavirus 2
IQYGRSGETLGVLVPH

SEQ ID NO: 25323 - protein, 15 aa, Severe acute respiratory syndrome-related coronavirus
  REGION 1..15: note = Table B: HLA-DPA1*01:03-B1*104:01L HLA-DRB1*07:01L
  source 1..15: note = Severe acute respiratory syndrome coronavirus 2
GGHSYGADLKSFDLG

SEQ ID NO: 25324 - protein, 11 aa, Severe acute respiratory syndrome-related coronavirus
  REGION 1..11: note = Table B: HLA-DPA1*01:03-B1*104:01L
  source 1..11: note = Severe acute respiratory syndrome coronavirus 2
YELQTPFEIKL

SEQ ID NO: 25325 - protein, 15 aa, Severe acute respiratory syndrome-related coronavirus
  REGION 1..15: note = Table B: HLA-DPA1*01:03-B1*104:01L
  source 1..15: note = Severe acute respiratory syndrome coronavirus 2
LDYKAFKQIVESCGN

SEQ ID NO: 25326 - protein, 14 aa, Severe acute respiratory syndrome-related coronavirus
  REGION 1..14: note = Table B: HLA-DPA1*01:03-B1*104:01L HLA-DRB1*07:01L
  source 1..14: note = Severe acute respiratory syndrome coronavirus 2
NSVRVLQKAAITIL

SEQ ID NO: 25327 - protein, 14 aa, Severe acute respiratory syndrome-related coronavirus
  REGION 1..14: note = Table B: HLA-DPA1*01:03-B1*104:01L
  source 1..14: note = Severe acute respiratory syndrome coronavirus 2
LVNKFLALCADSII

SEQ ID NO: 25328 - protein, 15 aa, Severe acute respiratory syndrome-related coronavirus
  REGION 1..15: note = Table B: HLA-DPA1*01:03-B1*104:01L HLA-DQA1*05:05-B1*03:01L HLA-DRB1*04:08L
  source 1..15: note = Severe acute respiratory syndrome coronavirus 2
GAKLKALNLGETFVT

SEQ ID NO: 25329 - protein, 13 aa, Severe acute respiratory syndrome-related coronavirus
  REGION 1..13: note = Table B: HLA-DPA1*01:03-B1*104:01L
  source 1..13: note = Severe acute respiratory syndrome coronavirus 2
TGLLMPLKAPKEI

SEQ ID NO: 25330 - protein, 17 aa, Severe acute respiratory syndrome-related coronavirus
  REGION 1..17: note = Table B: HLA-DPA1*01:03-B1*104:01L
  source 1..17: note = Severe acute respiratory syndrome coronavirus 2
ERIDKVLNEKCSAYTVE

SEQ ID NO: 25331 - protein, 13 aa, Severe acute respiratory syndrome-related coronavirus
  REGION 1..13: note = Table B: HLA-DPA1*01:03-B1*104:01L
  source 1..13: note = Severe acute respiratory syndrome coronavirus 2
AVIKTLQPVSELL

SEQ ID NO: 25332 - protein, 16 aa, Severe acute respiratory syndrome-related coronavirus
  REGION 1..16: note = Table B: HLA-DPA1*01:03-B1*104:01L
  source 1..16: note = Severe acute respiratory syndrome coronavirus 2
LQPVSELLTPLGIDLD

SEQ ID NO: 25333 - protein, 13 aa, Severe acute respiratory syndrome-related coronavirus
  REGION 1..13: note = Table B: HLA-DPA1*01:03-B1*104:01L
  source 1..13: note = Severe acute respiratory syndrome coronavirus 2
ALNKATNNAMQVE

SEQ ID NO: 25334 - protein, 14 aa, Severe acute respiratory syndrome-related coronavirus
  REGION 1..14: note = Table B: HLA-DPA1*01:03-B1*104:01L
  source 1..14: note = Severe acute respiratory syndrome coronavirus 2
VESDDYIATNGPLK

SEQ ID NO: 25335 - protein, 13 aa, Severe acute respiratory syndrome-related coronavirus
  REGION 1..13: note = Table B: HLA-DPA1*01:03-B1*104:01L HLA-DRB1*07:01L
  source 1..13: note = Severe acute respiratory syndrome coronavirus 2
YTSKTTVASLINT

SEQ ID NO: 25336 - protein, 16 aa, Severe acute respiratory syndrome-related coronavirus
  REGION 1..16: note = Table B: HLA-DPA1*01:03-B1*104:01L
  source 1..16: note = Severe acute respiratory syndrome coronavirus 2
MPLGYVTHGLNLEEAA

SEQ ID NO: 25337 - protein, 16 aa, Severe acute respiratory syndrome-related coronavirus
  REGION 1..16: note = Table B: HLA-DPA1*01:03-B1*104:01L HLA-DPA1*01:02-B1*04:01L
  source 1..16: note = Severe acute respiratory syndrome coronavirus 2
AVTAYNGYLTSSSKTP

SEQ ID NO: 25338 - protein, 16 aa, Severe acute respiratory syndrome-related coronavirus
  REGION 1..16: note = Table B: HLA-DPA1*01:03-B1*104:01L
  source 1..16: note = Severe acute respiratory syndrome coronavirus 2
VITFDNLKTLLSLREV

SEQ ID NO: 25339 - protein, 13 aa, Severe acute respiratory syndrome-related coronavirus
  REGION 1..13: note = Table B: HLA-DPA1*01:03-B1*104:01L
  source 1..13: note = Severe acute respiratory syndrome coronavirus 2
RARAGEAANFCAL

SEQ ID NO: 25340 - protein, 18 aa, Severe acute respiratory syndrome-related coronavirus
  REGION 1..18: note = Table B: HLA-DPA1*01:03-B1*104:01L
  source 1..18: note = Severe acute respiratory syndrome coronavirus 2
ELKHGTFTCASEYTGNYQ

SEQ ID NO: 25341 - protein, 16 aa, Severe acute respiratory syndrome-related coronavirus
  REGION 1..16: note = Table B: HLA-DPA1*01:03-B1*104:01L
  source 1..16: note = Severe acute respiratory syndrome coronavirus 2
HYKHITSKETLYCIDG

SEQ ID NO: 25342 - protein, 17 aa, Severe acute respiratory syndrome-related coronavirus
  REGION 1..17: note = Table B: HLA-DPA1*01:03-B1*104:01L
  source 1..17: note = Severe acute respiratory syndrome coronavirus 2
YKHITSKETLYCIDGAL

SEQ ID NO: 25343 - protein, 13 aa, Severe acute respiratory syndrome-related coronavirus
  REGION 1..13: note = Table B: HLA-DPA1*01:03-B1*104:01L
  source 1..13: note = Severe acute respiratory syndrome coronavirus 2
LVPNQPYPNASFD

SEQ ID NO: 25344 - protein, 11 aa, Severe acute respiratory syndrome-related coronavirus
  REGION 1..11: note = Table B: HLA-DPA1*01:03-B1*104:01L
  source 1..11: note = Severe acute respiratory syndrome coronavirus 2
GDVVAIDYKHY

SEQ ID NO: 25345 - protein, 16 aa, Severe acute respiratory syndrome-related coronavirus
  REGION 1..16: note = Table B: HLA-DPA1*01:03-B1*104:01L
  source 1..16: note = Severe acute respiratory syndrome coronavirus 2
DTIANYAKPFLNKVVS

SEQ ID NO: 25346 - protein, 11 aa, Severe acute respiratory syndrome-related coronavirus
  REGION 1..11: note = Table B: HLA-DPA1*01:03-B1*104:01L
  source 1..11: note = Severe acute respiratory syndrome coronavirus 2
MAPISAMVRMY

SEQ ID NO: 25347 - protein, 16 aa, Severe acute respiratory syndrome-related coronavirus
  REGION 1..16: note = Table B: HLA-DPA1*01:03-B1*104:01L
  source 1..16: note = Severe acute respiratory syndrome coronavirus 2
VNGVRRSFYVYANGGK

SEQ ID NO: 25348 - protein, 15 aa, Severe acute respiratory syndrome-related coronavirus
  REGION 1..15: note = Table B: HLA-DPA1*01:03-B1*104:01L
  source 1..15: note = Severe acute respiratory syndrome coronavirus 2
GVRRSFYVYANGGKG

SEQ ID NO: 25349 - protein, 16 aa, Severe acute respiratory syndrome-related coronavirus
  REGION 1..16: note = Table B: HLA-DPA1*01:03-B1*104:01L
  source 1..16: note = Severe acute respiratory syndrome coronavirus 2
DQSSYIVDSVTVKNGS

SEQ ID NO: 25350 - protein, 15 aa, Severe acute respiratory syndrome-related coronavirus
  REGION 1..15: note = Table B: HLA-DPA1*01:03-B1*104:01L
  source 1..15: note = Severe acute respiratory syndrome coronavirus 2
NNTKGSLPINVIVFD

SEQ ID NO: 25351 - protein, 18 aa, Severe acute respiratory syndrome-related coronavirus
  REGION 1..18: note = Table B: HLA-DPA1*01:03-B1*104:01L
  source 1..18: note = Severe acute respiratory syndrome coronavirus 2
NTKGSLPINVIVFDGKSK

SEQ ID NO: 25352 - protein, 11 aa, Severe acute respiratory syndrome-related coronavirus
  REGION 1..11: note = Table B: HLA-DPA1*01:03-B1*104:01L HLA-DRB1*15:03L
  source 1..11: note = Severe acute respiratory syndrome coronavirus 2
ATAEAELAKNV

SEQ ID NO: 25353 - protein, 16 aa, Severe acute respiratory syndrome-related coronavirus
  REGION 1..16: note = Table B: HLA-DPA1*01:03-B1*104:01L
  source 1..16: note = Severe acute respiratory syndrome coronavirus 2
YMLTYNKVENMTPRDL

SEQ ID NO: 25354 - protein, 15 aa, Severe acute respiratory syndrome-related coronavirus
  REGION 1..15: note = Table B: HLA-DPA1*01:03-B1*104:01L
  source 1..15: note = Severe acute respiratory syndrome coronavirus 2
QVAKSHNIALIWNVK

SEQ ID NO: 25355 - protein, 14 aa, Severe acute respiratory syndrome-related coronavirus
  REGION 1..14: note = Table B: HLA-DPA1*01:03-B1*104:01L HLA-DQA1*01:03-B1*06:01L
  source 1..14: note = Severe acute respiratory syndrome coronavirus 2
TSYREAACCHLAKA

SEQ ID NO: 25356 - protein, 15 aa, Severe acute respiratory syndrome-related coronavirus
  REGION 1..15: note = Table B: HLA-DPA1*01:03-B1*104:01L
  source 1..15: note = Severe acute respiratory syndrome coronavirus 2
HLAKALNDFSNSGSD

SEQ ID NO: 25357 - protein, 16 aa, Severe acute respiratory syndrome-related coronavirus
  REGION 1..16: note = Table B: HLA-DPA1*01:03-B1*104:01L
  source 1..16: note = Severe acute respiratory syndrome coronavirus 2
LNPNYEDLLIRKSNHN

SEQ ID NO: 25358 - protein, 14 aa, Severe acute respiratory syndrome-related coronavirus
  REGION 1..14: note = Table B: HLA-DPA1*01:03-B1*104:01L HLA-DRB1*04:08L
  source 1..14: note = Severe acute respiratory syndrome coronavirus 2
VVTTVMFLARGIVF

SEQ ID NO: 25359 - protein, 18 aa, Severe acute respiratory syndrome-related coronavirus
  REGION 1..18: note = Table B: HLA-DPA1*01:03-B1*104:01L
  source 1..18: note = Severe acute respiratory syndrome coronavirus 2
GKPCIKVATVQSKMSDVK

SEQ ID NO: 25360 - protein, 15 aa, Severe acute respiratory syndrome-related coronavirus
  REGION 1..15: note = Table B: HLA-DPA1*01:03-B1*104:01L HLA-DRB1*07:01L
  source 1..15: note = Severe acute respiratory syndrome coronavirus 2
LSVLLSMQGAVDINK

SEQ ID NO: 25361 - protein, 11 aa, Severe acute respiratory syndrome-related coronavirus
  REGION 1..11: note = Table B: HLA-DPA1*01:03-B1*104:01L
  source 1..11: note = Severe acute respiratory syndrome coronavirus 2
MLDNRATLQAI

SEQ ID NO: 25362 - protein, 18 aa, Severe acute respiratory syndrome-related coronavirus
  REGION 1..18: note = Table B: HLA-DPA1*01:03-B1*104:01L
  source 1..18: note = Severe acute respiratory syndrome coronavirus 2
SAMQTMLFTMLRKLDNDA

SEQ ID NO: 25363 - protein, 15 aa, Severe acute respiratory syndrome-related coronavirus
  REGION 1..15: note = Table B: HLA-DPA1*01:03-B1*104:01L HLA-DRB1*15:01L
  source 1..15: note = Severe acute respiratory syndrome coronavirus 2
IVTALRANSAVKLQN

SEQ ID NO: 25364 - protein, 11 aa, Severe acute respiratory syndrome-related coronavirus
  REGION 1..11: note = Table B: HLA-DPA1*01:03-B1*104:01L
  source 1..11: note = Severe acute respiratory syndrome coronavirus 2
TACTDDNALAY

SEQ ID NO: 25365 - protein, 14 aa, Severe acute respiratory syndrome-related coronavirus
  REGION 1..14: note = Table B: HLA-DPA1*01:03-B1*104:01L HLA-DRB1*08:02L
  source 1..14: note = Severe acute respiratory syndrome coronavirus 2
YLYFIKGLNNLNRG

SEQ ID NO: 25366 - protein, 14 aa, Severe acute respiratory syndrome-related coronavirus
  REGION 1..14: note = Table B: HLA-DPA1*01:03-B1*104:01L HLA-DRB1*07:01L
  source 1..14: note = Severe acute respiratory syndrome coronavirus 2
LKGKYVQIPTTCAN

SEQ ID NO: 25367 - protein, 15 aa, Severe acute respiratory syndrome-related coronavirus
  REGION 1..15: note = Table B: HLA-DPA1*01:03-B1*104:01L HLA-DRB1*07:01L HLA-DRB1*08:02L
  source 1..15: note = Severe acute respiratory syndrome coronavirus 2
KGKYVQIPTTCANDP

SEQ ID NO: 25368 - protein, 15 aa, Severe acute respiratory syndrome-related coronavirus
  REGION 1..15: note = Table B: HLA-DPA1*01:03-B1*104:01L
  source 1..15: note = Severe acute respiratory syndrome coronavirus 2
GKYVQIPTTCANDPV

SEQ ID NO: 25369 - protein, 15 aa, Severe acute respiratory syndrome-related coronavirus
  REGION 1..15: note = Table B: HLA-DPA1*01:03-B1*104:01L HLA-DRB1*07:01L
  source 1..15: note = Severe acute respiratory syndrome coronavirus 2
VVYRAFDIYNDKVAG

SEQ ID NO: 25370 - protein, 15 aa, Severe acute respiratory syndrome-related coronavirus
  REGION 1..15: note = Table B: HLA-DPA1*01:03-B1*104:01L
  source 1..15: note = Severe acute respiratory syndrome coronavirus 2
NLLKDCPAVAKHDFF

SEQ ID NO: 25371 - protein, 15 aa, Severe acute respiratory syndrome-related coronavirus
  REGION 1..15: note = Table B: HLA-DPA1*01:03-B1*104:01L
  source 1..15: note = Severe acute respiratory syndrome coronavirus 2
FNKKDWYDFVENPDI

SEQ ID NO: 25372 - protein, 15 aa, Severe acute respiratory syndrome-related coronavirus
  REGION 1..15: note = Table B: HLA-DPA1*01:03-B1*104:01L
  source 1..15: note = Severe acute respiratory syndrome coronavirus 2
ILTLTRALTAESHVD

SEQ ID NO: 25373 - protein, 16 aa, Severe acute respiratory syndrome-related coronavirus
  REGION 1..16: note = Table B: HLA-DPA1*01:03-B1*104:01L
  source 1..16: note = Severe acute respiratory syndrome coronavirus 2
TKPYIKWDLLKYDFTE

SEQ ID NO: 25374 - protein, 16 aa, Severe acute respiratory syndrome-related coronavirus
  REGION 1..16: note = Table B: HLA-DPA1*01:03-B1*104:01L
  source 1..16: note = Severe acute respiratory syndrome coronavirus 2
ELGVVHNQDVNLHSSR

SEQ ID NO: 25375 - protein, 17 aa, Severe acute respiratory syndrome-related coronavirus
  REGION 1..17: note = Table B: HLA-DPA1*01:03-B1*104:01L HLA-DRB1*15:03L
  source 1..17: note = Severe acute respiratory syndrome coronavirus 2
DKRTTCFSVAALTNNVA

SEQ ID NO: 25376 - protein, 16 aa, Severe acute respiratory syndrome-related coronavirus
  REGION 1..16: note = Table B: HLA-DPA1*01:03-B1*104:01L
  source 1..16: note = Severe acute respiratory syndrome coronavirus 2
VKPGNFNKDFYDFAVS

SEQ ID NO: 25377 - protein, 16 aa, Severe acute respiratory syndrome-related coronavirus
  REGION 1..16: note = Table B: HLA-DPA1*01:03-B1*104:01L
  source 1..16: note = Severe acute respiratory syndrome coronavirus 2
DFAVSKGFFKEGSSVE

SEQ ID NO: 25378 - protein, 14 aa, Severe acute respiratory syndrome-related coronavirus
  REGION 1..14: note = Table B: HLA-DPA1*01:03-B1*104:01L
  source 1..14: note = Severe acute respiratory syndrome coronavirus 2
LFAYTKRNVIPTIT

SEQ ID NO: 25379 - protein, 14 aa, Severe acute respiratory syndrome-related coronavirus
  REGION 1..14: note = Table B: HLA-DPA1*01:03-B1*104:01L
  source 1..14: note = Severe acute respiratory syndrome coronavirus 2
LSHRFYRLANECAQ

SEQ ID NO: 25380 - protein, 15 aa, Severe acute respiratory syndrome-related coronavirus
  REGION 1..15: note = Table B: HLA-DPA1*01:03-B1*104:01L HLA-DQA1*05:05-B1*03:01L
  source 1..15: note = Severe acute respiratory syndrome coronavirus 2
TAYANSVFNICQAVT

SEQ ID NO: 25381 - protein, 16 aa, Severe acute respiratory syndrome-related coronavirus
  REGION 1..16: note = Table B: HLA-DPA1*01:03-B1*104:01L
  source 1..16: note = Severe acute respiratory syndrome coronavirus 2
NLQHRLYECLYRNRDV

SEQ ID NO: 25382 - protein, 18 aa, Severe acute respiratory syndrome-related coronavirus
  REGION 1..18: note = Table B: HLA-DPA1*01:03-B1*104:01L
  source 1..18: note = Severe acute respiratory syndrome coronavirus 2
PDPSRILGAGCFVDDIVK

SEQ ID NO: 25383 - protein, 14 aa, Severe acute respiratory syndrome-related coronavirus
  REGION 1..14: note = Table B: HLA-DPA1*01:03-B1*104:01L
  source 1..14: note = Severe acute respiratory syndrome coronavirus 2
FKLSYGIATVREVL

SEQ ID NO: 25384 - protein, 15 aa, Severe acute respiratory syndrome-related coronavirus
  REGION 1..15: note = Table B: HLA-DPA1*01:03-B1*104:01L
  source 1..15: note = Severe acute respiratory syndrome coronavirus 2
EQYVFCTVNALPETT

SEQ ID NO: 25385 - protein, 15 aa, Severe acute respiratory syndrome-related coronavirus
  REGION 1..15: note = Table B: HLA-DPA1*01:03-B1*104:01L HLA-DQA1*05:05-B1*03:01L
  source 1..15: note = Severe acute respiratory syndrome coronavirus 2
SALVYDNKLKAHKDK

SEQ ID NO: 25386 - protein, 14 aa, Severe acute respiratory syndrome-related coronavirus
  REGION 1..14: note = Table B: HLA-DPA1*01:03-B1*104:01L
  source 1..14: note = Severe acute respiratory syndrome coronavirus 2
FKMFYKGVITHDVS

SEQ ID NO: 25387 - protein, 14 aa, Severe acute respiratory syndrome-related coronavirus
  REGION 1..14: note = Table B: HLA-DPA1*01:03-B1*104:01L
  source 1..14: note = Severe acute respiratory syndrome coronavirus 2
WRKAVFISPYNSQN

SEQ ID NO: 25388 - protein, 13 aa, Severe acute respiratory syndrome-related coronavirus
  REGION 1..13: note = Table B: HLA-DPA1*01:03-B1*104:01L
  source 1..13: note = Severe acute respiratory syndrome coronavirus 2
VATLQAENVTGLF

SEQ ID NO: 25389 - protein, 12 aa, Severe acute respiratory syndrome-related coronavirus
  REGION 1..12: note = Table B: HLA-DPA1*01:03-B1*104:01L HLA-DRB1*16:01L
  source 1..12: note = Severe acute respiratory syndrome coronavirus 2
VDIPGIPKDMTY

SEQ ID NO: 25390 - protein, 15 aa, Severe acute respiratory syndrome-related coronavirus
  REGION 1..15: note = Table B: HLA-DPA1*01:03-B1*104:01L
  source 1..15: note = Severe acute respiratory syndrome coronavirus 2
STGVNLVAVPTGYVD

SEQ ID NO: 25391 - protein, 17 aa, Severe acute respiratory syndrome-related coronavirus
  REGION 1..17: note = Table B: HLA-DPA1*01:03-B1*104:01L
  source 1..17: note = Severe acute respiratory syndrome coronavirus 2
DQFKHLIPLMYKGLPWN

SEQ ID NO: 25392 - protein, 14 aa, Severe acute respiratory syndrome-related coronavirus
  REGION 1..14: note = Table B: HLA-DPA1*01:03-B1*104:01L
  source 1..14: note = Severe acute respiratory syndrome coronavirus 2
TSMKYFVKIGPERT

SEQ ID NO: 25393 - protein, 15 aa, Severe acute respiratory syndrome-related coronavirus
  REGION 1..15: note = Table B: HLA-DPA1*01:03-B1*104:01L
  source 1..15: note = Severe acute respiratory syndrome coronavirus 2
KVQHMVVKAALLADK

SEQ ID NO: 25394 - protein, 17 aa, Severe acute respiratory syndrome-related coronavirus
  REGION 1..17: note = Table B: HLA-DPA1*01:03-B1*104:01L
  source 1..17: note = Severe acute respiratory syndrome coronavirus 2
EELFYSYATHSDKFTDG

SEQ ID NO: 25395 - protein, 14 aa, Severe acute respiratory syndrome-related coronavirus
  REGION 1..14: note = Table B: HLA-DPA1*01:03-B1*104:01L
  source 1..14: note = Severe acute respiratory syndrome coronavirus 2
NVAFNVVNKGHFDG

SEQ ID NO: 25396 - protein, 14 aa, Severe acute respiratory syndrome-related coronavirus
  REGION 1..14: note = Table B: HLA-DPA1*01:03-B1*104:01L
  source 1..14: note = Severe acute respiratory syndrome coronavirus 2
IINNTVYTKVDGVD

SEQ ID NO: 25397 - protein, 15 aa, Severe acute respiratory syndrome-related coronavirus
  REGION 1..15: note = Table B: HLA-DPA1*01:03-B1*104:01L HLA-DQA1*01:03-B1*06:01L
  source 1..15: note = Severe acute respiratory syndrome coronavirus 2
DIAKKPTETICAPLT

SEQ ID NO: 25398 - protein, 11 aa, Severe acute respiratory syndrome-related coronavirus
  REGION 1..11: note = Table B: HLA-DPA1*01:03-B1*104:01L
  source 1..11: note = Severe acute respiratory syndrome coronavirus 2
TLIGEAVKTQF

SEQ ID NO: 25399 - protein, 15 aa, Severe acute respiratory syndrome-related coronavirus
  REGION 1..15: note = Table B: HLA-DPA1*01:03-B1*104:01L
  source 1..15: note = Severe acute respiratory syndrome coronavirus 2
TQFNYYKKVDGVVQQ

SEQ ID NO: 25400 - protein, 15 aa, Severe acute respiratory syndrome-related coronavirus
  REGION 1..15: note = Table B: HLA-DPA1*01:03-B1*104:01L
  source 1..15: note = Severe acute respiratory syndrome coronavirus 2
YYKKVDGVVQQLPET

SEQ ID NO: 25401 - protein, 19 aa, Severe acute respiratory syndrome-related coronavirus
  REGION 1..19: note = Table B: HLA-DPA1*01:03-B1*104:01L
  source 1..19: note = Severe acute respiratory syndrome coronavirus 2
PETYFTQSRNLQEFKPRSQ

SEQ ID NO: 25402 - protein, 16 aa, Severe acute respiratory syndrome-related coronavirus
  REGION 1..16: note = Table B: HLA-DPA1*01:03-B1*104:01L
  source 1..16: note = Severe acute respiratory syndrome coronavirus 2
IGLAKRFKESPFELED

SEQ ID NO: 25403 - protein, 15 aa, Severe acute respiratory syndrome-related coronavirus
  REGION 1..15: note = Table B: HLA-DPA1*01:03-B1*104:01L
  source 1..15: note = Severe acute respiratory syndrome coronavirus 2
DLLLDDFVEIIKSQD

SEQ ID NO: 25404 - protein, 11 aa, Severe acute respiratory syndrome-related coronavirus
  REGION 1..11: note = Table B: HLA-DPA1*01:03-B1*104:01L
  source 1..11: note = Severe acute respiratory syndrome coronavirus 2
VEIIKSQDLSV

SEQ ID NO: 25405 - protein, 16 aa, Severe acute respiratory syndrome-related coronavirus
  REGION 1..16: note = Table B: HLA-DPA1*01:03-B1*104:01L
  source 1..16: note = Severe acute respiratory syndrome coronavirus 2
GSVAIKITEHSWNADL

SEQ ID NO: 25406 - protein, 13 aa, Severe acute respiratory syndrome-related coronavirus
  REGION 1..13: note = Table B: HLA-DPA1*01:03-B1*104:01L HLA-DPA1*01:02-B1*04:01L HLA-DRB1*08:02L
  source 1..13: note = Severe acute respiratory syndrome coronavirus 2
AFVTNVNASSSEA

SEQ ID NO: 25407 - protein, 12 aa, Severe acute respiratory syndrome-related coronavirus
  REGION 1..12: note = Table B: HLA-DPA1*01:03-B1*104:01L
  source 1..12: note = Severe acute respiratory syndrome coronavirus 2
YIFWRNTNPIQL

SEQ ID NO: 25408 - protein, 15 aa, Severe acute respiratory syndrome-related coronavirus
  REGION 1..15: note = Table B: HLA-DPA1*01:03-B1*104:01L
  source 1..15: note = Severe acute respiratory syndrome coronavirus 2
IIRENNRVVISSDVL

SEQ ID NO: 25409 - protein, 14 aa, Severe acute respiratory syndrome-related coronavirus
  REGION 1..14: note = Table B: HLA-DPA1*01:03-B1*104:01L
  source 1..14: note = Severe acute respiratory syndrome coronavirus 2
RGVYYPDKVFRSSV

SEQ ID NO: 25410 - protein, 16 aa, Severe acute respiratory syndrome-related coronavirus
  REGION 1..16: note = Table B: HLA-DPA1*01:03-B1*104:01L
  source 1..16: note = Severe acute respiratory syndrome coronavirus 2
PDKVFRSSVLHSTQDL

SEQ ID NO: 25411 - protein, 11 aa, Severe acute respiratory syndrome-related coronavirus
  REGION 1..11: note = Table B: HLA-DPA1*01:03-B1*104:01L
  source 1..11: note = Severe acute respiratory syndrome coronavirus 2
TLDSKTQSLLI

SEQ ID NO: 25412 - protein, 13 aa, Severe acute respiratory syndrome-related coronavirus
  REGION 1..13: note = Table B: HLA-DPA1*01:03-B1*104:01L
  source 1..13: note = Severe acute respiratory syndrome coronavirus 2
NDPFLGVYYHKNN

SEQ ID NO: 25413 - protein, 16 aa, Severe acute respiratory syndrome-related coronavirus
  REGION 1..16: note = Table B: HLA-DPA1*01:03-B1*104:01L
  source 1..16: note = Severe acute respiratory syndrome coronavirus 2
EPLVDLPIGINITRFQ

SEQ ID NO: 25414 - protein, 16 aa, Severe acute respiratory syndrome-related coronavirus
  REGION 1..16: note = Table B: HLA-DPA1*01:03-B1*104:01L HLA-DRB1*08:02L HLA-DRB1*08:03L
  source 1..16: note = Severe acute respiratory syndrome coronavirus 2
QTLLALHRSYLTPGDS

SEQ ID NO: 25415 - protein, 11 aa, Severe acute respiratory syndrome-related coronavirus
  REGION 1..11: note = Table B: HLA-DPA1*01:03-B1*104:01L
  source 1..11: note = Severe acute respiratory syndrome coronavirus 2
SGWTAGAAAYY

SEQ ID NO: 25416 - protein, 15 aa, Severe acute respiratory syndrome-related coronavirus
  REGION 1..15: note = Table B: HLA-DPA1*01:03-B1*104:01L HLA-DQA1*05:05-B1*03:01L
  source 1..15: note = Severe acute respiratory syndrome coronavirus 2
SIVRFPNITNLCPFG

SEQ ID NO: 25417 - protein, 14 aa, Severe acute respiratory syndrome-related coronavirus
  REGION 1..14: note = Table B: HLA-DPA1*01:03-B1*104:01L HLA-DRB1*07:01L
  source 1..14: note = Severe acute respiratory syndrome coronavirus 2
WNRKRISNCVADYS

SEQ ID NO: 25418 - protein, 16 aa, Severe acute respiratory syndrome-related coronavirus
  REGION 1..16: note = Table B: HLA-DPA1*01:03-B1*104:01L
  source 1..16: note = Severe acute respiratory syndrome coronavirus 2
QPYRVVVLSFELLHAP

SEQ ID NO: 25419 - protein, 18 aa, Severe acute respiratory syndrome-related coronavirus
  REGION 1..18: note = Table B: HLA-DPA1*01:03-B1*104:01L
  source 1..18: note = Severe acute respiratory syndrome coronavirus 2
TGTGVLTESNKKFLPFQQ

SEQ ID NO: 25420 - protein, 16 aa, Severe acute respiratory syndrome-related coronavirus
  REGION 1..16: note = Table B: HLA-DPA1*01:03-B1*104:01L HLA-DQA1*01:03-B1*06:01L
  source 1..16: note = Severe acute respiratory syndrome coronavirus 2
VAVLYQDVNCTEVPVA

SEQ ID NO: 25421 - protein, 15 aa, Severe acute respiratory syndrome-related coronavirus
  REGION 1..15: note = Table B: HLA-DPA1*01:03-B1*104:01L
  source 1..15: note = Severe acute respiratory syndrome coronavirus 2
DQLTPTWRVYSTGSN

SEQ ID NO: 25422 - protein, 13 aa, Severe acute respiratory syndrome-related coronavirus
  REGION 1..13: note = Table B: HLA-DPA1*01:03-B1*104:01L
  source 1..13: note = Severe acute respiratory syndrome coronavirus 2
YTMSLGAENSVAY

SEQ ID NO: 25423 - protein, 15 aa, Severe acute respiratory syndrome-related coronavirus
  REGION 1..15: note = Table B: HLA-DPA1*01:03-B1*104:01L
  source 1..15: note = Severe acute respiratory syndrome coronavirus 2
GKLQDVVNQNAQALN

SEQ ID NO: 25424 - protein, 15 aa, Severe acute respiratory syndrome-related coronavirus
  REGION 1..15: note = Table B: HLA-DPA1*01:03-B1*104:01L
  source 1..15: note = Severe acute respiratory syndrome coronavirus 2
HFPREGVFVSNGTHW

SEQ ID NO: 25425 - protein, 15 aa, Severe acute respiratory syndrome-related coronavirus
  REGION 1..15: note = Table B: HLA-DPA1*01:03-B1*104:01L
  source 1..15: note = Severe acute respiratory syndrome coronavirus 2
TQRNFYEPQIITTDN

SEQ ID NO: 25426 - protein, 14 aa, Severe acute respiratory syndrome-related coronavirus
  REGION 1..14: note = Table B: HLA-DPA1*01:03-B1*104:01L
  source 1..14: note = Severe acute respiratory syndrome coronavirus 2
RNFYEPQIITTDNT

SEQ ID NO: 25427 - protein, 15 aa, Severe acute respiratory syndrome-related coronavirus
  REGION 1..15: note = Table B: HLA-DPA1*01:03-B1*104:01L
  source 1..15: note = Severe acute respiratory syndrome coronavirus 2
KYFKNHTSPDVDLGD

SEQ ID NO: 25428 - protein, 13 aa, Severe acute respiratory syndrome-related coronavirus
  REGION 1..13: note = Table B: HLA-DPA1*01:03-B1*104:01L
  source 1..13: note = Severe acute respiratory syndrome coronavirus 2
LLAVFQSASKIIT

SEQ ID NO: 25429 - protein, 14 aa, Severe acute respiratory syndrome-related coronavirus
  REGION 1..14: note = Table B: HLA-DPA1*01:03-B1*104:01L
  source 1..14: note = Severe acute respiratory syndrome coronavirus 2
LKKRWQLALSKGVH

SEQ ID NO: 25430 - protein, 14 aa, Severe acute respiratory syndrome-related coronavirus
  REGION 1..14: note = Table B: HLA-DPA1*01:03-B1*104:01L
  source 1..14: note = Severe acute respiratory syndrome coronavirus 2
RINWITGGIAIAMA

SEQ ID NO: 25431 - protein, 11 aa, Severe acute respiratory syndrome-related coronavirus
  REGION 1..11: note = Table B: HLA-DPA1*01:03-B1*104:01L
  source 1..11: note = Severe acute respiratory syndrome coronavirus 2
GDSGFAAYSRY

SEQ ID NO: 25432 - protein, 17 aa, Severe acute respiratory syndrome-related coronavirus
  REGION 1..17: note = Table B: HLA-DPA1*01:03-B1*104:01L
  source 1..17: note = Severe acute respiratory syndrome coronavirus 2
SKWYIRVGARKSAPLIE

SEQ ID NO: 25433 - protein, 18 aa, Severe acute respiratory syndrome-related coronavirus
  REGION 1..18: note = Table B: HLA-DPA1*01:03-B1*104:01L
  source 1..18: note = Severe acute respiratory syndrome coronavirus 2
APLIELCVDEAGSKSPIQ

SEQ ID NO: 25434 - protein, 13 aa, Severe acute respiratory syndrome-related coronavirus
  REGION 1..13: note = Table B: HLA-DPA1*01:03-B1*104:01L
  source 1..13: note = Severe acute respiratory syndrome coronavirus 2
EPKLGSLVVRCSF

SEQ ID NO: 25435 - protein, 16 aa, Severe acute respiratory syndrome-related coronavirus
  REGION 1..16: note = Table B: HLA-DPA1*01:03-B1*104:01L
  source 1..16: note = Severe acute respiratory syndrome coronavirus 2
GPSDSTGSNQNGERSG

SEQ ID NO: 25436 - protein, 15 aa, Severe acute respiratory syndrome-related coronavirus
  REGION 1..15: note = Table B: HLA-DPA1*01:03-B1*104:01L
  source 1..15: note = Severe acute respiratory syndrome coronavirus 2
FYYLGTGPEAGLPYG

SEQ ID NO: 25437 - protein, 13 aa, Severe acute respiratory syndrome-related coronavirus
  REGION 1..13: note = Table B: HLA-DPA1*01:03-B1*104:01L
  source 1..13: note = Severe acute respiratory syndrome coronavirus 2
WLTYTGAIKLDDK

SEQ ID NO: 25438 - protein, 16 aa, Severe acute respiratory syndrome-related coronavirus
  REGION 1..16: note = Table B: HLA-DPA1*01:03-B1*104:01L HLA-DRB1*07:01L
  source 1..16: note = Severe acute respiratory syndrome coronavirus 2
FSKQLQQSMSSADSTQ

SEQ ID NO: 25439 - protein, 13 aa, Severe acute respiratory syndrome-related coronavirus
  REGION 1..13: note = Table B: HLA-DQA1*05:05-B1*03:01L
  source 1..13: note = Severe acute respiratory syndrome coronavirus 2
LKDGTCGLVEVEK

SEQ ID NO: 25440 - protein, 12 aa, Severe acute respiratory syndrome-related coronavirus
  REGION 1..12: note = Table B: HLA-DQA1*05:05-B1*03:01L
  source 1..12: note = Severe acute respiratory syndrome coronavirus 2
VEVEKGVLPQLE

SEQ ID NO: 25441 - protein, 13 aa, Severe acute respiratory syndrome-related coronavirus
  REGION 1..13: note = Table B: HLA-DQA1*05:05-B1*03:01L
  source 1..13: note = Severe acute respiratory syndrome coronavirus 2
EVEKGVLPQLEQP

SEQ ID NO: 25442 - protein, 14 aa, Severe acute respiratory syndrome-related coronavirus
  REGION 1..14: note = Table B: HLA-DQA1*05:05-B1*03:01L
  source 1..14: note = Severe acute respiratory syndrome coronavirus 2
AGGHSYGADLKSFD

SEQ ID NO: 25443 - protein, 16 aa, Severe acute respiratory syndrome-related coronavirus
  REGION 1..16: note = Table B: HLA-DQA1*05:05-B1*03:01L
  source 1..16: note = Severe acute respiratory syndrome coronavirus 2
TENLTKEGATTCGYLP

SEQ ID NO: 25444 - protein, 14 aa, Severe acute respiratory syndrome-related coronavirus
  REGION 1..14: note = Table B: HLA-DQA1*05:05-B1*03:01L HLA-DQA1*01:03-B1*06:01L
  source 1..14: note = Severe acute respiratory syndrome coronavirus 2
LTKEGATTCGYLPQ

SEQ ID NO: 25445 - protein, 14 aa, Severe acute respiratory syndrome-related coronavirus
  REGION 1..14: note = Table B: HLA-DQA1*05:05-B1*03:01L
  source 1..14: note = Severe acute respiratory syndrome coronavirus 2
LNEEIAIILASFSA

SEQ ID NO: 25446 - protein, 12 aa, Severe acute respiratory syndrome-related coronavirus
  REGION 1..12: note = Table B: HLA-DQA1*05:05-B1*03:01L
  source 1..12: note = Severe acute respiratory syndrome coronavirus 2
ASEAARVVRSIF

SEQ ID NO: 25447 - protein, 12 aa, Severe acute respiratory syndrome-related coronavirus
  REGION 1..12: note = Table B: HLA-DQA1*05:05-B1*03:01L
  source 1..12: note = Severe acute respiratory syndrome coronavirus 2
SEAARVVRSIFS

SEQ ID NO: 25448 - protein, 11 aa, Severe acute respiratory syndrome-related coronavirus
  REGION 1..11: note = Table B: HLA-DQA1*05:05-B1*03:01L
  source 1..11: note = Severe acute respiratory syndrome coronavirus 2
AYITGGVVQLT

SEQ ID NO: 25449 - protein, 12 aa, Severe acute respiratory syndrome-related coronavirus
  REGION 1..12: note = Table B: HLA-DQA1*05:05-B1*03:01L
  source 1..12: note = Severe acute respiratory syndrome coronavirus 2
EAPLVGTPVCIN

SEQ ID NO: 25450 - protein, 13 aa, Severe acute respiratory syndrome-related coronavirus
  REGION 1..13: note = Table B: HLA-DQA1*05:05-B1*03:01L
  source 1..13: note = Severe acute respiratory syndrome coronavirus 2
ALAPNMMVTNNTF

SEQ ID NO: 25451 - protein, 16 aa, Severe acute respiratory syndrome-related coronavirus
  REGION 1..16: note = Table B: HLA-DQA1*05:05-B1*03:01L
  source 1..16: note = Severe acute respiratory syndrome coronavirus 2
DKVLNEKCSAYTVELG

SEQ ID NO: 25452 - protein, 12 aa, Severe acute respiratory syndrome-related coronavirus
  REGION 1..12: note = Table B: HLA-DQA1*05:05-B1*03:01L
  source 1..12: note = Severe acute respiratory syndrome coronavirus 2
YTVELGTEVNEF

SEQ ID NO: 25453 - protein, 17 aa, Severe acute respiratory syndrome-related coronavirus
  REGION 1..17: note = Table B: HLA-DQA1*05:05-B1*03:01L
  source 1..17: note = Severe acute respiratory syndrome coronavirus 2
DLDEWSMATYYLFDESG

SEQ ID NO: 25454 - protein, 14 aa, Severe acute respiratory syndrome-related coronavirus
  REGION 1..14: note = Table B: HLA-DQA1*05:05-B1*03:01L
  source 1..14: note = Severe acute respiratory syndrome coronavirus 2
EFEPSTQYEYGTED

SEQ ID NO: 25455 - protein, 11 aa, Severe acute respiratory syndrome-related coronavirus
  REGION 1..11: note = Table B: HLA-DQA1*05:05-B1*03:01L
  source 1..11: note = Severe acute respiratory syndrome coronavirus 2
DDYQGKPLEFG

SEQ ID NO: 25456 - protein, 16 aa, Severe acute respiratory syndrome-related coronavirus
  REGION 1..16: note = Table B: HLA-DQA1*05:05-B1*03:01L HLA-DQA1*01:03-B1*06:01L HLA-DQA1*02:01-B1*03:03L
  source 1..16: note = Severe acute respiratory syndrome coronavirus 2
VGQQDGSEDNQTTTIQ

SEQ ID NO: 25457 - protein, 12 aa, Severe acute respiratory syndrome-related coronavirus
  REGION 1..12: note = Table B: HLA-DQA1*05:05-B1*03:01L
  source 1..12: note = Severe acute respiratory syndrome coronavirus 2
TNNAMQVESDDY

SEQ ID NO: 25458 - protein, 13 aa, Severe acute respiratory syndrome-related coronavirus
  REGION 1..13: note = Table B: HLA-DQA1*05:05-B1*03:01L
  source 1..13: note = Severe acute respiratory syndrome coronavirus 2
FNQHEVLLAPLLS

SEQ ID NO: 25459 - protein, 14 aa, Severe acute respiratory syndrome-related coronavirus
  REGION 1..14: note = Table B: HLA-DQA1*05:05-B1*03:01L HLA-DQA1*01:03-B1*06:01L
  source 1..14: note = Severe acute respiratory syndrome coronavirus 2
VVQEGVLTAVVIPT

SEQ ID NO: 25460 - protein, 11 aa, Severe acute respiratory syndrome-related coronavirus
  REGION 1..11: note = Table B: HLA-DQA1*05:05-B1*03:01L
  source 1..11: note = Severe acute respiratory syndrome coronavirus 2
GTTEMLAKALR

SEQ ID NO: 25461 - protein, 12 aa, Severe acute respiratory syndrome-related coronavirus
  REGION 1..12: note = Table B: HLA-DQA1*05:05-B1*03:01L
  source 1..12: note = Severe acute respiratory syndrome coronavirus 2
YPGQGLNGYTVE

SEQ ID NO: 25462 - protein, 13 aa, Severe acute respiratory syndrome-related coronavirus
  REGION 1..13: note = Table B: HLA-DQA1*05:05-B1*03:01L
  source 1..13: note = Severe acute respiratory syndrome coronavirus 2
TSKTTVASLINTL

SEQ ID NO: 25463 - protein, 15 aa, Severe acute respiratory syndrome-related coronavirus
  REGION 1..15: note = Table B: HLA-DQA1*05:05-B1*03:01L
  source 1..15: note = Severe acute respiratory syndrome coronavirus 2
DVTKIKPHNSHEGKT

SEQ ID NO: 25464 - protein, 17 aa, Severe acute respiratory syndrome-related coronavirus
  REGION 1..17: note = Table B: HLA-DQA1*05:05-B1*03:01L
  source 1..17: note = Severe acute respiratory syndrome coronavirus 2
IKPHNSHEGKTFYVLPN

SEQ ID NO: 25465 - protein, 15 aa, Severe acute respiratory syndrome-related coronavirus
  REGION 1..15: note = Table B: HLA-DQA1*05:05-B1*03:01L
  source 1..15: note = Severe acute respiratory syndrome coronavirus 2
TSIKWADNNCYLATA

SEQ ID NO: 25466 - protein, 13 aa, Severe acute respiratory syndrome-related coronavirus
  REGION 1..13: note = Table B: HLA-DQA1*05:05-B1*03:01L
  source 1..13: note = Severe acute respiratory syndrome coronavirus 2
AVMYMGTLSYEQF

SEQ ID NO: 25467 - protein, 15 aa, Severe acute respiratory syndrome-related coronavirus
  REGION 1..15: note = Table B: HLA-DQA1*05:05-B1*03:01L
  source 1..15: note = Severe acute respiratory syndrome coronavirus 2
LVQQESPFVMMSAPP

SEQ ID NO: 25468 - protein, 12 aa, Severe acute respiratory syndrome-related coronavirus
  REGION 1..12: note = Table B: HLA-DQA1*05:05-B1*03:01L
  source 1..12: note = Severe acute respiratory syndrome coronavirus 2
SSEYKGPITDVF

SEQ ID NO: 25469 - protein, 12 aa, Severe acute respiratory syndrome-related coronavirus
  REGION 1..12: note = Table B: HLA-DQA1*05:05-B1*03:01L
  source 1..12: note = Severe acute respiratory syndrome coronavirus 2
VPNQPYPNASFD

SEQ ID NO: 25470 - protein, 17 aa, Severe acute respiratory syndrome-related coronavirus
  REGION 1..17: note = Table B: HLA-DQA1*05:05-B1*03:01L
  source 1..17: note = Severe acute respiratory syndrome coronavirus 2
NPTIQKDVLECNVKTTE

SEQ ID NO: 25471 - protein, 16 aa, Severe acute respiratory syndrome-related coronavirus
  REGION 1..16: note = Table B: HLA-DQA1*05:05-B1*03:01L
  source 1..16: note = Severe acute respiratory syndrome coronavirus 2
IQKDVLECNVKTTEVV

SEQ ID NO: 25472 - protein, 13 aa, Severe acute respiratory syndrome-related coronavirus
  REGION 1..13: note = Table B: HLA-DQA1*05:05-B1*03:01L
  source 1..13: note = Severe acute respiratory syndrome coronavirus 2
PANNSLKITEEVG

SEQ ID NO: 25473 - protein, 14 aa, Severe acute respiratory syndrome-related coronavirus
  REGION 1..14: note = Table B: HLA-DQA1*05:05-B1*03:01L
  source 1..14: note = Severe acute respiratory syndrome coronavirus 2
SLKITEEVGHTDLM

SEQ ID NO: 25474 - protein, 14 aa, Severe acute respiratory syndrome-related coronavirus
  REGION 1..14: note = Table B: HLA-DQA1*05:05-B1*03:01L
  source 1..14: note = Severe acute respiratory syndrome coronavirus 2
ITEEVGHTDLMAAY

SEQ ID NO: 25475 - protein, 12 aa, Severe acute respiratory syndrome-related coronavirus
  REGION 1..12: note = Table B: HLA-DQA1*05:05-B1*03:01L
  source 1..12: note = Severe acute respiratory syndrome coronavirus 2
KTLATHGLAAVN

SEQ ID NO: 25476 - protein, 12 aa, Severe acute respiratory syndrome-related coronavirus
  REGION 1..12: note = Table B: HLA-DQA1*05:05-B1*03:01L HLA-DRB1*14:17L
  source 1..12: note = Severe acute respiratory syndrome coronavirus 2
GLAAVNSVPWDT

SEQ ID NO: 25477 - protein, 13 aa, Severe acute respiratory syndrome-related coronavirus
  REGION 1..13: note = Table B: HLA-DQA1*05:05-B1*03:01L
  source 1..13: note = Severe acute respiratory syndrome coronavirus 2
SNLGMPSYCTGYR

SEQ ID NO: 25478 - protein, 14 aa, Severe acute respiratory syndrome-related coronavirus
  REGION 1..14: note = Table B: HLA-DQA1*05:05-B1*03:01L
  source 1..14: note = Severe acute respiratory syndrome coronavirus 2
TGSIPCSVCLSGLD

SEQ ID NO: 25479 - protein, 14 aa, Severe acute respiratory syndrome-related coronavirus
  REGION 1..14: note = Table B: HLA-DQA1*05:05-B1*03:01L
  source 1..14: note = Severe acute respiratory syndrome coronavirus 2
GSIPCSVCLSGLDS

SEQ ID NO: 25480 - protein, 14 aa, Severe acute respiratory syndrome-related coronavirus
  REGION 1..14: note = Table B: HLA-DQA1*05:05-B1*03:01L
  source 1..14: note = Severe acute respiratory syndrome coronavirus 2
SLDTYPSLETIQIT

SEQ ID NO: 25481 - protein, 14 aa, Severe acute respiratory syndrome-related coronavirus
  REGION 1..14: note = Table B: HLA-DQA1*05:05-B1*03:01L
  source 1..14: note = Severe acute respiratory syndrome coronavirus 2
DTYPSLETIQITIS

SEQ ID NO: 25482 - protein, 15 aa, Severe acute respiratory syndrome-related coronavirus
  REGION 1..15: note = Table B: HLA-DQA1*05:05-B1*03:01L
  source 1..15: note = Severe acute respiratory syndrome coronavirus 2
SSFKWDLTAFGLVAE

SEQ ID NO: 25483 - protein, 13 aa, Severe acute respiratory syndrome-related coronavirus
  REGION 1..13: note = Table B: HLA-DQA1*05:05-B1*03:01L
  source 1..13: note = Severe acute respiratory syndrome coronavirus 2
VTVKNGSIHLYFD

SEQ ID NO: 25484 - protein, 12 aa, Severe acute respiratory syndrome-related coronavirus
  REGION 1..12: note = Table B: HLA-DQA1*05:05-B1*03:01L
  source 1..12: note = Severe acute respiratory syndrome coronavirus 2
NTKGSLPINVIV

SEQ ID NO: 25485 - protein, 14 aa, Severe acute respiratory syndrome-related coronavirus
  REGION 1..14: note = Table B: HLA-DQA1*05:05-B1*03:01L
  source 1..14: note = Severe acute respiratory syndrome coronavirus 2
TKGSLPINVIVFDG

SEQ ID NO: 25486 - protein, 11 aa, Severe acute respiratory syndrome-related coronavirus
  REGION 1..11: note = Table B: HLA-DQA1*05:05-B1*03:01L
  source 1..11: note = Severe acute respiratory syndrome coronavirus 2
AKSASVYYSQL

SEQ ID NO: 25487 - protein, 16 aa, Severe acute respiratory syndrome-related coronavirus
  REGION 1..16: note = Table B: HLA-DQA1*05:05-B1*03:01L
  source 1..16: note = Severe acute respiratory syndrome coronavirus 2
LAKNVSLDNVLSTFIS

SEQ ID NO: 25488 - protein, 12 aa, Severe acute respiratory syndrome-related coronavirus
  REGION 1..12: note = Table B: HLA-DQA1*05:05-B1*03:01L
  source 1..12: note = Severe acute respiratory syndrome coronavirus 2
ALKGGKIVNNWL

SEQ ID NO: 25489 - protein, 12 aa, Severe acute respiratory syndrome-related coronavirus
  REGION 1..12: note = Table B: HLA-DQA1*05:05-B1*03:01L
  source 1..12: note = Severe acute respiratory syndrome coronavirus 2
VGFVVPGLPGTI

SEQ ID NO: 25490 - protein, 13 aa, Severe acute respiratory syndrome-related coronavirus
  REGION 1..13: note = Table B: HLA-DQA1*05:05-B1*03:01L
  source 1..13: note = Severe acute respiratory syndrome coronavirus 2
VFSAVGNICYTPS

SEQ ID NO: 25491 - protein, 13 aa, Severe acute respiratory syndrome-related coronavirus
  REGION 1..13: note = Table B: HLA-DQA1*05:05-B1*03:01L HLA-DQA1*01:03-B1*06:01L HLA-DQA1*02:01-B1*03:03L
  source 1..13: note = Severe acute respiratory syndrome coronavirus 2
ASGKPVPYCYDTN

SEQ ID NO: 25492 - protein, 13 aa, Severe acute respiratory syndrome-related coronavirus
  REGION 1..13: note = Table B: HLA-DQA1*05:05-B1*03:01L
  source 1..13: note = Severe acute respiratory syndrome coronavirus 2
YDTNVLEGSVAYE

SEQ ID NO: 25493 - protein, 13 aa, Severe acute respiratory syndrome-related coronavirus
  REGION 1..13: note = Table B: HLA-DQA1*05:05-B1*03:01L
  source 1..13: note = Severe acute respiratory syndrome coronavirus 2
DTNVLEGSVAYES

SEQ ID NO: 25494 - protein, 12 aa, Severe acute respiratory syndrome-related coronavirus
  REGION 1..12: note = Table B: HLA-DQA1*05:05-B1*03:01L
  source 1..12: note = Severe acute respiratory syndrome coronavirus 2
TYLEGSVRVVTT

SEQ ID NO: 25495 - protein, 12 aa, Severe acute respiratory syndrome-related coronavirus
  REGION 1..12: note = Table B: HLA-DQA1*05:05-B1*03:01L
  source 1..12: note = Severe acute respiratory syndrome coronavirus 2
ASIVAGGIVAIV

SEQ ID NO: 25496 - protein, 12 aa, Severe acute respiratory syndrome-related coronavirus
  REGION 1..12: note = Table B: HLA-DQA1*05:05-B1*03:01L
  source 1..12: note = Severe acute respiratory syndrome coronavirus 2
SIVAGGIVAIVV

SEQ ID NO: 25497 - protein, 15 aa, Severe acute respiratory syndrome-related coronavirus
  REGION 1..15: note = Table B: HLA-DQA1*05:05-B1*03:01L
  source 1..15: note = Severe acute respiratory syndrome coronavirus 2
FTVLCLTPVYSFLPG

SEQ ID NO: 25498 - protein, 13 aa, Severe acute respiratory syndrome-related coronavirus
  REGION 1..13: note = Table B: HLA-DQA1*05:05-B1*03:01L HLA-DRB1*04:08L
  source 1..13: note = Severe acute respiratory syndrome coronavirus 2
ITIAYIICISTKH

SEQ ID NO: 25499 - protein, 13 aa, Severe acute respiratory syndrome-related coronavirus
  REGION 1..13: note = Table B: HLA-DQA1*05:05-B1*03:01L
  source 1..13: note = Severe acute respiratory syndrome coronavirus 2
LRSDVLLPLTQYN

SEQ ID NO: 25500 - protein, 16 aa, Severe acute respiratory syndrome-related coronavirus
  REGION 1..16: note = Table B: HLA-DQA1*05:05-B1*03:01L
  source 1..16: note = Severe acute respiratory syndrome coronavirus 2
LPLTQYNRYLALYNKY

SEQ ID NO: 25501 - protein, 12 aa, Severe acute respiratory syndrome-related coronavirus
  REGION 1..12: note = Table B: HLA-DQA1*05:05-B1*03:01L
  source 1..12: note = Severe acute respiratory syndrome coronavirus 2
DVLYQPPQTSIT

SEQ ID NO: 25502 - protein, 12 aa, Severe acute respiratory syndrome-related coronavirus
  REGION 1..12: note = Table B: HLA-DQA1*05:05-B1*03:01L
  source 1..12: note = Severe acute respiratory syndrome coronavirus 2
VLYQPPQTSITS

SEQ ID NO: 25503 - protein, 13 aa, Severe acute respiratory syndrome-related coronavirus
  REGION 1..13: note = Table B: HLA-DQA1*05:05-B1*03:01L
  source 1..13: note = Severe acute respiratory syndrome coronavirus 2
GKVEGCMVQVTCG

SEQ ID NO: 25504 - protein, 12 aa, Severe acute respiratory syndrome-related coronavirus
  REGION 1..12: note = Table B: HLA-DQA1*05:05-B1*03:01L
  source 1..12: note = Severe acute respiratory syndrome coronavirus 2
VQAGNVQLRVIG

SEQ ID NO: 25505 - protein, 14 aa, Severe acute respiratory syndrome-related coronavirus
  REGION 1..14: note = Table B: HLA-DQA1*05:05-B1*03:01L
  source 1..14: note = Severe acute respiratory syndrome coronavirus 2
IQPGQTFSVLACYN

SEQ ID NO: 25506 - protein, 13 aa, Severe acute respiratory syndrome-related coronavirus
  REGION 1..13: note = Table B: HLA-DQA1*05:05-B1*03:01L
  source 1..13: note = Severe acute respiratory syndrome coronavirus 2
VLACYNGSPSGVY

SEQ ID NO: 25507 - protein, 15 aa, Severe acute respiratory syndrome-related coronavirus
  REGION 1..15: note = Table B: HLA-DQA1*05:05-B1*03:01L
  source 1..15: note = Severe acute respiratory syndrome coronavirus 2
AGTDLEGNFYGPFVD

SEQ ID NO: 25508 - protein, 13 aa, Severe acute respiratory syndrome-related coronavirus
  REGION 1..13: note = Table B: HLA-DQA1*05:05-B1*03:01L HLA-DQA1*02:01-B1*03:03L
  source 1..13: note = Severe acute respiratory syndrome coronavirus 2
LLQNGMNGRTILG

SEQ ID NO: 25509 - protein, 14 aa, Severe acute respiratory syndrome-related coronavirus
  REGION 1..14: note = Table B: HLA-DQA1*05:05-B1*03:01L HLA-DQA1*02:01-B1*03:03L
  source 1..14: note = Severe acute respiratory syndrome coronavirus 2
LQNGMNGRTILGSA

SEQ ID NO: 25510 - protein, 13 aa, Severe acute respiratory syndrome-related coronavirus
  REGION 1..13: note = Table B: HLA-DQA1*05:05-B1*03:01L HLA-DQA1*01:03-B1*06:01L
  source 1..13: note = Severe acute respiratory syndrome coronavirus 2
ILTSLLVLVQSTQ

SEQ ID NO: 25511 - protein, 13 aa, Severe acute respiratory syndrome-related coronavirus
  REGION 1..13: note = Table B: HLA-DQA1*05:05-B1*03:01L
  source 1..13: note = Severe acute respiratory syndrome coronavirus 2
FLYENAFLPFAMG

SEQ ID NO: 25512 - protein, 14 aa, Severe acute respiratory syndrome-related coronavirus
  REGION 1..14: note = Table B: HLA-DQA1*05:05-B1*03:01L
  source 1..14: note = Severe acute respiratory syndrome coronavirus 2
LPSLATVAYFNMVY

SEQ ID NO: 25513 - protein, 11 aa, Severe acute respiratory syndrome-related coronavirus
  REGION 1..11: note = Table B: HLA-DQA1*05:05-B1*03:01L
  source 1..11: note = Severe acute respiratory syndrome coronavirus 2
ILMTARTVYDD

SEQ ID NO: 25514 - protein, 12 aa, Severe acute respiratory syndrome-related coronavirus
  REGION 1..12: note = Table B: HLA-DQA1*05:05-B1*03:01L
  source 1..12: note = Severe acute respiratory syndrome coronavirus 2
FFITGNTLQCIM

SEQ ID NO: 25515 - protein, 13 aa, Severe acute respiratory syndrome-related coronavirus
  REGION 1..13: note = Table B: HLA-DQA1*05:05-B1*03:01L
  source 1..13: note = Severe acute respiratory syndrome coronavirus 2
VLQQLRVESSSKL

SEQ ID NO: 25516 - protein, 13 aa, Severe acute respiratory syndrome-related coronavirus
  REGION 1..13: note = Table B: HLA-DQA1*05:05-B1*03:01L
  source 1..13: note = Severe acute respiratory syndrome coronavirus 2
VESSSKLWAQCVQ

SEQ ID NO: 25517 - protein, 14 aa, Severe acute respiratory syndrome-related coronavirus
  REGION 1..14: note = Table B: HLA-DQA1*05:05-B1*03:01L HLA-DRB1*15:03L
  source 1..14: note = Severe acute respiratory syndrome coronavirus 2
TLQAIASEFSSLPS

SEQ ID NO: 25518 - protein, 14 aa, Severe acute respiratory syndrome-related coronavirus
  REGION 1..14: note = Table B: HLA-DQA1*05:05-B1*03:01L HLA-DRB1*15:03L
  source 1..14: note = Severe acute respiratory syndrome coronavirus 2
QAIASEFSSLPSYA

SEQ ID NO: 25519 - protein, 13 aa, Severe acute respiratory syndrome-related coronavirus
  REGION 1..13: note = Table B: HLA-DQA1*05:05-B1*03:01L
  source 1..13: note = Severe acute respiratory syndrome coronavirus 2
AKVTSAMQTMLFT

SEQ ID NO: 25520 - protein, 14 aa, Severe acute respiratory syndrome-related coronavirus
  REGION 1..14: note = Table B: HLA-DQA1*05:05-B1*03:01L
  source 1..14: note = Severe acute respiratory syndrome coronavirus 2
TYASALWEIQQVVD

SEQ ID NO: 25521 - protein, 14 aa, Severe acute respiratory syndrome-related coronavirus
  REGION 1..14: note = Table B: HLA-DQA1*05:05-B1*03:01L
  source 1..14: note = Severe acute respiratory syndrome coronavirus 2
FPKSDGTGTIYTEL

SEQ ID NO: 25522 - protein, 13 aa, Severe acute respiratory syndrome-related coronavirus
  REGION 1..13: note = Table B: HLA-DQA1*05:05-B1*03:01L
  source 1..13: note = Severe acute respiratory syndrome coronavirus 2
ATEVPANSTVLSF

SEQ ID NO: 25523 - protein, 14 aa, Severe acute respiratory syndrome-related coronavirus
  REGION 1..14: note = Table B: HLA-DQA1*05:05-B1*03:01L
  source 1..14: note = Severe acute respiratory syndrome coronavirus 2
TEVPANSTVLSFCA

SEQ ID NO: 25524 - protein, 12 aa, Severe acute respiratory syndrome-related coronavirus
  REGION 1..12: note = Table B: HLA-DQA1*05:05-B1*03:01L
  source 1..12: note = Severe acute respiratory syndrome coronavirus 2
THTGTGQAITVT

SEQ ID NO: 25525 - protein, 12 aa, Severe acute respiratory syndrome-related coronavirus
  REGION 1..12: note = Table B: HLA-DQA1*05:05-B1*03:01L
  source 1..12: note = Severe acute respiratory syndrome coronavirus 2
DQESFGGASCCL

SEQ ID NO: 25526 - protein, 14 aa, Severe acute respiratory syndrome-related coronavirus
  REGION 1..14: note = Table B: HLA-DQA1*05:05-B1*03:01L
  source 1..14: note = Severe acute respiratory syndrome coronavirus 2
QESFGGASCCLYCR

SEQ ID NO: 25527 - protein, 14 aa, Severe acute respiratory syndrome-related coronavirus
  REGION 1..14: note = Table B: HLA-DQA1*05:05-B1*03:01L
  source 1..14: note = Severe acute respiratory syndrome coronavirus 2
NTVCTVCGMWKGYG

SEQ ID NO: 25528 - protein, 12 aa, Severe acute respiratory syndrome-related coronavirus
  REGION 1..12: note = Table B: HLA-DQA1*05:05-B1*03:01L HLA-DRB1*04:08L
  source 1..12: note = Severe acute respiratory syndrome coronavirus 2
NYQHEETIYNLL

SEQ ID NO: 25529 - protein, 14 aa, Severe acute respiratory syndrome-related coronavirus
  REGION 1..14: note = Table B: HLA-DQA1*05:05-B1*03:01L
  source 1..14: note = Severe acute respiratory syndrome coronavirus 2
VENPDILRVYANLG

SEQ ID NO: 25530 - protein, 12 aa, Severe acute respiratory syndrome-related coronavirus
  REGION 1..12: note = Table B: HLA-DQA1*05:05-B1*03:01L
  source 1..12: note = Severe acute respiratory syndrome coronavirus 2
AMRNAGIVGVLT

SEQ ID NO: 25531 - protein, 14 aa, Severe acute respiratory syndrome-related coronavirus
  REGION 1..14: note = Table B: HLA-DQA1*05:05-B1*03:01L
  source 1..14: note = Severe acute respiratory syndrome coronavirus 2
MRNAGIVGVLTLDN

SEQ ID NO: 25532 - protein, 15 aa, Severe acute respiratory syndrome-related coronavirus
  REGION 1..15: note = Table B: HLA-DQA1*05:05-B1*03:01L
  source 1..15: note = Severe acute respiratory syndrome coronavirus 2
WDQTYHPNCVNCLDD

SEQ ID NO: 25533 - protein, 13 aa, Severe acute respiratory syndrome-related coronavirus
  REGION 1..13: note = Table B: HLA-DQA1*05:05-B1*03:01L
  source 1..13: note = Severe acute respiratory syndrome coronavirus 2
VLFSTVFPPTSFG

SEQ ID NO: 25534 - protein, 14 aa, Severe acute respiratory syndrome-related coronavirus
  REGION 1..14: note = Table B: HLA-DQA1*05:05-B1*03:01L
  source 1..14: note = Severe acute respiratory syndrome coronavirus 2
DVNLHSSRLSFKEL

SEQ ID NO: 25535 - protein, 13 aa, Severe acute respiratory syndrome-related coronavirus
  REGION 1..13: note = Table B: HLA-DQA1*05:05-B1*03:01L
  source 1..13: note = Severe acute respiratory syndrome coronavirus 2
FFKEGSSVELKHF

SEQ ID NO: 25536 - protein, 13 aa, Severe acute respiratory syndrome-related coronavirus
  REGION 1..13: note = Table B: HLA-DQA1*05:05-B1*03:01L
  source 1..13: note = Severe acute respiratory syndrome coronavirus 2
LDKSAGFPFNKWG

SEQ ID NO: 25537 - protein, 15 aa, Severe acute respiratory syndrome-related coronavirus
  REGION 1..15: note = Table B: HLA-DQA1*05:05-B1*03:01L
  source 1..15: note = Severe acute respiratory syndrome coronavirus 2
DSMSYEDQDALFAYT

SEQ ID NO: 25538 - protein, 11 aa, Severe acute respiratory syndrome-related coronavirus
  REGION 1..11: note = Table B: HLA-DQA1*05:05-B1*03:01L HLA-DQA1*01:03-B1*06:01L
  source 1..11: note = Severe acute respiratory syndrome coronavirus 2
STMTNRQFHQK

SEQ ID NO: 25539 - protein, 11 aa, Severe acute respiratory syndrome-related coronavirus
  REGION 1..11: note = Table B: HLA-DQA1*05:05-B1*03:01L
  source 1..11: note = Severe acute respiratory syndrome coronavirus 2
SIAATRGATVV

SEQ ID NO: 25540 - protein, 13 aa, Severe acute respiratory syndrome-related coronavirus
  REGION 1..13: note = Table B: HLA-DQA1*05:05-B1*03:01L
  source 1..13: note = Severe acute respiratory syndrome coronavirus 2
LYVKPGGTSSGDA

SEQ ID NO: 25541 - protein, 14 aa, Severe acute respiratory syndrome-related coronavirus
  REGION 1..14: note = Table B: HLA-DQA1*05:05-B1*03:01L
  source 1..14: note = Severe acute respiratory syndrome coronavirus 2
LSDDAVVCFNSTYA

SEQ ID NO: 25542 - protein, 12 aa, Severe acute respiratory syndrome-related coronavirus
  REGION 1..12: note = Table B: HLA-DQA1*05:05-B1*03:01L
  source 1..12: note = Severe acute respiratory syndrome coronavirus 2
QHTMLVKQGDDY

SEQ ID NO: 25543 - protein, 12 aa, Severe acute respiratory syndrome-related coronavirus
  REGION 1..12: note = Table B: HLA-DQA1*05:05-B1*03:01L
  source 1..12: note = Severe acute respiratory syndrome coronavirus 2
TDGTLMIERFVS

SEQ ID NO: 25544 - protein, 14 aa, Severe acute respiratory syndrome-related coronavirus
  REGION 1..14: note = Table B: HLA-DQA1*05:05-B1*03:01L HLA-DQA1*01:03-B1*06:01L HLA-DQA1*02:01-B1*03:03L
  source 1..14: note = Severe acute respiratory syndrome coronavirus 2
ERFVSLAIDAYPLT

SEQ ID NO: 25545 - protein, 13 aa, Severe acute respiratory syndrome-related coronavirus
  REGION 1..13: note = Table B: HLA-DQA1*05:05-B1*03:01L
  source 1..13: note = Severe acute respiratory syndrome coronavirus 2
QAVGACVLCNSQT

SEQ ID NO: 25546 - protein, 13 aa, Severe acute respiratory syndrome-related coronavirus
  REGION 1..13: note = Table B: HLA-DQA1*05:05-B1*03:01L
  source 1..13: note = Severe acute respiratory syndrome coronavirus 2
AVGACVLCNSQTS

SEQ ID NO: 25547 - protein, 14 aa, Severe acute respiratory syndrome-related coronavirus
  REGION 1..14: note = Table B: HLA-DQA1*05:05-B1*03:01L
  source 1..14: note = Severe acute respiratory syndrome coronavirus 2
NPYVCNAPGCDVTD

SEQ ID NO: 25548 - protein, 13 aa, Severe acute respiratory syndrome-related coronavirus
  REGION 1..13: note = Table B: HLA-DQA1*05:05-B1*03:01L
  source 1..13: note = Severe acute respiratory syndrome coronavirus 2
DVTDVTQLYLGGM

SEQ ID NO: 25549 - protein, 16 aa, Severe acute respiratory syndrome-related coronavirus
  REGION 1..16: note = Table B: HLA-DQA1*05:05-B1*03:01L
  source 1..16: note = Severe acute respiratory syndrome coronavirus 2
LYLGGMSYYCKSHKPP

SEQ ID NO: 25550 - protein, 14 aa, Severe acute respiratory syndrome-related coronavirus
  REGION 1..14: note = Table B: HLA-DQA1*05:05-B1*03:01L HLA-DQA1*01:03-B1*06:01L
  source 1..14: note = Severe acute respiratory syndrome coronavirus 2
NVTDFNAIATCDWT

SEQ ID NO: 25551 - protein, 11 aa, Severe acute respiratory syndrome-related coronavirus
  REGION 1..11: note = Table B: HLA-DQA1*05:05-B1*03:01L
  source 1..11: note = Severe acute respiratory syndrome coronavirus 2
SWEVGKPRPPL

SEQ ID NO: 25552 - protein, 14 aa, Severe acute respiratory syndrome-related coronavirus
  REGION 1..14: note = Table B: HLA-DQA1*05:05-B1*03:01L
  source 1..14: note = Severe acute respiratory syndrome coronavirus 2
PETTADIVVFDEIS

SEQ ID NO: 25553 - protein, 18 aa, Severe acute respiratory syndrome-related coronavirus
  REGION 1..18: note = Table B: HLA-DQA1*05:05-B1*03:01L
  source 1..18: note = Severe acute respiratory syndrome coronavirus 2
LEPEYFNSVCRLMKTIGP

SEQ ID NO: 25554 - protein, 12 aa, Severe acute respiratory syndrome-related coronavirus
  REGION 1..12: note = Table B: HLA-DQA1*05:05-B1*03:01L
  source 1..12: note = Severe acute respiratory syndrome coronavirus 2
YNSQNAVASKIL

SEQ ID NO: 25555 - protein, 15 aa, Severe acute respiratory syndrome-related coronavirus
  REGION 1..15: note = Table B: HLA-DQA1*05:05-B1*03:01L HLA-DRB1*10:01L
  source 1..15: note = Severe acute respiratory syndrome coronavirus 2
YRRLISMMGFKMNYQ

SEQ ID NO: 25556 - protein, 14 aa, Severe acute respiratory syndrome-related coronavirus
  REGION 1..14: note = Table B: HLA-DQA1*05:05-B1*03:01L
  source 1..14: note = Severe acute respiratory syndrome coronavirus 2
VGTNLPLQLGFSTG

SEQ ID NO: 25557 - protein, 19 aa, Severe acute respiratory syndrome-related coronavirus
  REGION 1..19: note = Table B: HLA-DQA1*05:05-B1*03:01L
  source 1..19: note = Severe acute respiratory syndrome coronavirus 2
PPGDQFKHLIPLMYKGLPW

SEQ ID NO: 25558 - protein, 12 aa, Severe acute respiratory syndrome-related coronavirus
  REGION 1..12: note = Table B: HLA-DQA1*05:05-B1*03:01L
  source 1..12: note = Severe acute respiratory syndrome coronavirus 2
WAHGFELTSMKY

SEQ ID NO: 25559 - protein, 15 aa, Severe acute respiratory syndrome-related coronavirus
  REGION 1..15: note = Table B: HLA-DQA1*05:05-B1*03:01L
  source 1..15: note = Severe acute respiratory syndrome coronavirus 2
GNLQSNHDLYCQVHG

SEQ ID NO: 25560 - protein, 15 aa, Severe acute respiratory syndrome-related coronavirus
  REGION 1..15: note = Table B: HLA-DQA1*05:05-B1*03:01L
  source 1..15: note = Severe acute respiratory syndrome coronavirus 2
AALLADKFPVLHDIG

SEQ ID NO: 25561 - protein, 14 aa, Severe acute respiratory syndrome-related coronavirus
  REGION 1..14: note = Table B: HLA-DQA1*05:05-B1*03:01L
  source 1..14: note = Severe acute respiratory syndrome coronavirus 2
VDRYPANSIVCRFD

SEQ ID NO: 25562 - protein, 14 aa, Severe acute respiratory syndrome-related coronavirus
  REGION 1..14: note = Table B: HLA-DQA1*05:05-B1*03:01L
  source 1..14: note = Severe acute respiratory syndrome coronavirus 2
YVPLKSATCITRCN

SEQ ID NO: 25563 - protein, 12 aa, Severe acute respiratory syndrome-related coronavirus
  REGION 1..12: note = Table B: HLA-DQA1*05:05-B1*03:01L
  source 1..12: note = Severe acute respiratory syndrome coronavirus 2
FTRLQSLENVAF

SEQ ID NO: 25564 - protein, 12 aa, Severe acute respiratory syndrome-related coronavirus
  REGION 1..12: note = Table B: HLA-DQA1*05:05-B1*03:01L
  source 1..12: note = Severe acute respiratory syndrome coronavirus 2
NKTTLPVNVAFE

SEQ ID NO: 25565 - protein, 13 aa, Severe acute respiratory syndrome-related coronavirus
  REGION 1..13: note = Table B: HLA-DQA1*05:05-B1*03:01L HLA-DQA1*01:03-B1*06:01L
  source 1..13: note = Severe acute respiratory syndrome coronavirus 2
KPTETICAPLTVF

SEQ ID NO: 25566 - protein, 15 aa, Severe acute respiratory syndrome-related coronavirus
  REGION 1..15: note = Table B: HLA-DQA1*05:05-B1*03:01L
  source 1..15: note = Severe acute respiratory syndrome coronavirus 2
FRNARNGVLITEGSV

SEQ ID NO: 25567 - protein, 15 aa, Severe acute respiratory syndrome-related coronavirus
  REGION 1..15: note = Table B: HLA-DQA1*05:05-B1*03:01L
  source 1..15: note = Severe acute respiratory syndrome coronavirus 2
GHVETFYPKLQSSQA

SEQ ID NO: 25568 - protein, 14 aa, Severe acute respiratory syndrome-related coronavirus
  REGION 1..14: note = Table B: HLA-DQA1*05:05-B1*03:01L
  source 1..14: note = Severe acute respiratory syndrome coronavirus 2
MLLEKCDLQNYGDS

SEQ ID NO: 25569 - protein, 16 aa, Severe acute respiratory syndrome-related coronavirus
  REGION 1..16: note = Table B: HLA-DQA1*05:05-B1*03:01L
  source 1..16: note = Severe acute respiratory syndrome coronavirus 2
VDSDLNDFVSDADSTL

SEQ ID NO: 25570 - protein, 16 aa, Severe acute respiratory syndrome-related coronavirus
  REGION 1..16: note = Table B: HLA-DQA1*05:05-B1*03:01L
  source 1..16: note = Severe acute respiratory syndrome coronavirus 2
TEHSWNADLYKLMGHF

SEQ ID NO: 25571 - protein, 16 aa, Severe acute respiratory syndrome-related coronavirus
  REGION 1..16: note = Table B: HLA-DQA1*05:05-B1*03:01L
  source 1..16: note = Severe acute respiratory syndrome coronavirus 2
EHSWNADLYKLMGHFA

SEQ ID NO: 25572 - protein, 12 aa, Severe acute respiratory syndrome-related coronavirus
  REGION 1..12: note = Table B: HLA-DQA1*05:05-B1*03:01L
  source 1..12: note = Severe acute respiratory syndrome coronavirus 2
VMSLKEGQINDM

SEQ ID NO: 25573 - protein, 13 aa, Severe acute respiratory syndrome-related coronavirus
  REGION 1..13: note = Table B: HLA-DQA1*05:05-B1*03:01L
  source 1..13: note = Severe acute respiratory syndrome coronavirus 2
VSSQCVNLTTRTQ

SEQ ID NO: 25574 - protein, 12 aa, Severe acute respiratory syndrome-related coronavirus
  REGION 1..12: note = Table B: HLA-DQA1*05:05-B1*03:01L
  source 1..12: note = Severe acute respiratory syndrome coronavirus 2
RSSVLHSTQDLF

SEQ ID NO: 25575 - protein, 13 aa, Severe acute respiratory syndrome-related coronavirus
  REGION 1..13: note = Table B: HLA-DQA1*05:05-B1*03:01L
  source 1..13: note = Severe acute respiratory syndrome coronavirus 2
NIIRGWIFGTTLD

SEQ ID NO: 25576 - protein, 15 aa, Severe acute respiratory syndrome-related coronavirus
  REGION 1..15: note = Table B: HLA-DQA1*05:05-B1*03:01L
  source 1..15: note = Severe acute respiratory syndrome coronavirus 2
SQPFLMDLEGKQGNF

SEQ ID NO: 25577 - protein, 13 aa, Severe acute respiratory syndrome-related coronavirus
  REGION 1..13: note = Table B: HLA-DQA1*05:05-B1*03:01L
  source 1..13: note = Severe acute respiratory syndrome coronavirus 2
SYLTPGDSSSGWT

SEQ ID NO: 25578 - protein, 14 aa, Severe acute respiratory syndrome-related coronavirus
  REGION 1..14: note = Table B: HLA-DQA1*05:05-B1*03:01L
  source 1..14: note = Severe acute respiratory syndrome coronavirus 2
YLTPGDSSSGWTAG

SEQ ID NO: 25579 - protein, 13 aa, Severe acute respiratory syndrome-related coronavirus
  REGION 1..13: note = Table B: HLA-DQA1*05:05-B1*03:01L
  source 1..13: note = Severe acute respiratory syndrome coronavirus 2
AGSTPCNGVEGFN

SEQ ID NO: 25580 - protein, 12 aa, Severe acute respiratory syndrome-related coronavirus
  REGION 1..12: note = Table B: HLA-DQA1*05:05-B1*03:01L
  source 1..12: note = Severe acute respiratory syndrome coronavirus 2
LSFELLHAPATV

SEQ ID NO: 25581 - protein, 14 aa, Severe acute respiratory syndrome-related coronavirus
  REGION 1..14: note = Table B: HLA-DQA1*05:05-B1*03:01L
  source 1..14: note = Severe acute respiratory syndrome coronavirus 2
SFELLHAPATVCGP

SEQ ID NO: 25582 - protein, 13 aa, Severe acute respiratory syndrome-related coronavirus
  REGION 1..13: note = Table B: HLA-DQA1*05:05-B1*03:01L
  source 1..13: note = Severe acute respiratory syndrome coronavirus 2
TNTSNQVAVLYQD

SEQ ID NO: 25583 - protein, 14 aa, Severe acute respiratory syndrome-related coronavirus
  REGION 1..14: note = Table B: HLA-DQA1*05:05-B1*03:01L
  source 1..14: note = Severe acute respiratory syndrome coronavirus 2
ADQLTPTWRVYSTG

SEQ ID NO: 25584 - protein, 12 aa, Severe acute respiratory syndrome-related coronavirus
  REGION 1..12: note = Table B: HLA-DQA1*05:05-B1*03:01L
  source 1..12: note = Severe acute respiratory syndrome coronavirus 2
DIPIGAGICASY

SEQ ID NO: 25585 - protein, 14 aa, Severe acute respiratory syndrome-related coronavirus
  REGION 1..14: note = Table B: HLA-DQA1*05:05-B1*03:01L
  source 1..14: note = Severe acute respiratory syndrome coronavirus 2
IGAGICASYQTQTN

SEQ ID NO: 25586 - protein, 13 aa, Severe acute respiratory syndrome-related coronavirus
  REGION 1..13: note = Table B: HLA-DQA1*05:05-B1*03:01L
  source 1..13: note = Severe acute respiratory syndrome coronavirus 2
MSLGAENSVAYSN

SEQ ID NO: 25587 - protein, 16 aa, Severe acute respiratory syndrome-related coronavirus
  REGION 1..16: note = Table B: HLA-DQA1*05:05-B1*03:01L
  source 1..16: note = Severe acute respiratory syndrome coronavirus 2
TKTSVDCTMYICGDST

SEQ ID NO: 25588 - protein, 14 aa, Severe acute respiratory syndrome-related coronavirus
  REGION 1..14: note = Table B: HLA-DQA1*05:05-B1*03:01L
  source 1..14: note = Severe acute respiratory syndrome coronavirus 2
GDSTECSNLLLQYG

SEQ ID NO: 25589 - protein, 13 aa, Severe acute respiratory syndrome-related coronavirus
  REGION 1..13: note = Table B: HLA-DQA1*05:05-B1*03:01L
  source 1..13: note = Severe acute respiratory syndrome coronavirus 2
LLLQYGSFCTQLN

SEQ ID NO: 25590 - protein, 13 aa, Severe acute respiratory syndrome-related coronavirus
  REGION 1..13: note = Table B: HLA-DQA1*05:05-B1*03:01L
  source 1..13: note = Severe acute respiratory syndrome coronavirus 2
YGSFCTQLNRALT

SEQ ID NO: 25591 - protein, 11 aa, Severe acute respiratory syndrome-related coronavirus
  REGION 1..11: note = Table B: HLA-DQA1*05:05-B1*03:01L
  source 1..11: note = Severe acute respiratory syndrome coronavirus 2
LLAGTITSGWT

SEQ ID NO: 25592 - protein, 14 aa, Severe acute respiratory syndrome-related coronavirus
  REGION 1..14: note = Table B: HLA-DQA1*05:05-B1*03:01L
  source 1..14: note = Severe acute respiratory syndrome coronavirus 2
TTDNTFVSGNCDVV

SEQ ID NO: 25593 - protein, 13 aa, Severe acute respiratory syndrome-related coronavirus
  REGION 1..13: note = Table B: HLA-DQA1*05:05-B1*03:01L HLA-DQA1*02:01-B1*03:03L
  source 1..13: note = Severe acute respiratory syndrome coronavirus 2
VSGNCDVVIGIVN

SEQ ID NO: 25594 - protein, 14 aa, Severe acute respiratory syndrome-related coronavirus
  REGION 1..14: note = Table B: HLA-DQA1*05:05-B1*03:01L
  source 1..14: note = Severe acute respiratory syndrome coronavirus 2
PDVDLGDISGINAS

SEQ ID NO: 25595 - protein, 15 aa, Severe acute respiratory syndrome-related coronavirus
  REGION 1..15: note = Table B: HLA-DQA1*05:05-B1*03:01L
  source 1..15: note = Severe acute respiratory syndrome coronavirus 2
DATPSDFVRATATIP

SEQ ID NO: 25596 - protein, 14 aa, Severe acute respiratory syndrome-related coronavirus
  REGION 1..14: note = Table B: HLA-DQA1*05:05-B1*03:01L HLA-DQA1*01:03-B1*06:01L HLA-DQA1*02:01-B1*03:03L
  source 1..14: note = Severe acute respiratory syndrome coronavirus 2
EKWESGVKDCVVLH

SEQ ID NO: 25597 - protein, 11 aa, Severe acute respiratory syndrome-related coronavirus
  REGION 1..11: note = Table B: HLA-DQA1*05:05-B1*03:01L
  source 1..11: note = Severe acute respiratory syndrome coronavirus 2
TDTGVEHVTFF

SEQ ID NO: 25598 - protein, 17 aa, Severe acute respiratory syndrome-related coronavirus
  REGION 1..17: note = Table B: HLA-DQA1*05:05-B1*03:01L
  source 1..17: note = Severe acute respiratory syndrome coronavirus 2
DTGVEHVTFFIYNKIVD

SEQ ID NO: 25599 - protein, 13 aa, Severe acute respiratory syndrome-related coronavirus
  REGION 1..13: note = Table B: HLA-DQA1*05:05-B1*03:01L
  source 1..13: note = Severe acute respiratory syndrome coronavirus 2
VQIHTIDGSSGVV

SEQ ID NO: 25600 - protein, 14 aa, Severe acute respiratory syndrome-related coronavirus
  REGION 1..14: note = Table B: HLA-DQA1*05:05-B1*03:01L
  source 1..14: note = Severe acute respiratory syndrome coronavirus 2
SFNPETNILLNVPL

SEQ ID NO: 25601 - protein, 13 aa, Severe acute respiratory syndrome-related coronavirus
  REGION 1..13: note = Table B: HLA-DQA1*05:05-B1*03:01L
  source 1..13: note = Severe acute respiratory syndrome coronavirus 2
NVPLHGTILTRPL

SEQ ID NO: 25602 - protein, 14 aa, Severe acute respiratory syndrome-related coronavirus
  REGION 1..14: note = Table B: HLA-DQA1*05:05-B1*03:01L
  source 1..14: note = Severe acute respiratory syndrome coronavirus 2
VPLHGTILTRPLLE

SEQ ID NO: 25603 - protein, 12 aa, Severe acute respiratory syndrome-related coronavirus
  REGION 1..12: note = Table B: HLA-DQA1*05:05-B1*03:01L HLA-DQA1*02:01-B1*03:03L
  source 1..12: note = Severe acute respiratory syndrome coronavirus 2
TLATCELYHYQE

SEQ ID NO: 25604 - protein, 14 aa, Severe acute respiratory syndrome-related coronavirus
  REGION 1..14: note = Table B: HLA-DQA1*05:05-B1*03:01L HLA-DQA1*01:03-B1*06:01L
  source 1..14: note = Severe acute respiratory syndrome coronavirus 2
YIRVGARKSAPLIE

SEQ ID NO: 25605 - protein, 13 aa, Severe acute respiratory syndrome-related coronavirus
  REGION 1..13: note = Table B: HLA-DQA1*05:05-B1*03:01L
  source 1..13: note = Severe acute respiratory syndrome coronavirus 2
PIQYIDIGNYTVS

SEQ ID NO: 25606 - protein, 14 aa, Severe acute respiratory syndrome-related coronavirus
  REGION 1..14: note = Table B: HLA-DQA1*05:05-B1*03:01L HLA-DQA1*02:01-B1*03:03L
  source 1..14: note = Severe acute respiratory syndrome coronavirus 2
GGPSDSTGSNQNGE

SEQ ID NO: 25607 - protein, 12 aa, Severe acute respiratory syndrome-related coronavirus
  REGION 1..12: note = Table B: HLA-DQA1*05:05-B1*03:01L HLA-DQA1*02:01-B1*03:03L
  source 1..12: note = Severe acute respiratory syndrome coronavirus 2
LKFPRGQGVPIN

SEQ ID NO: 25608 - protein, 10 aa, Severe acute respiratory syndrome-related coronavirus
  REGION 1..10: note = Table B: HLA-DQA1*05:05-B1*03:01L
  source 1..10: note = Severe acute respiratory syndrome coronavirus 2
EAGLPYGANK

SEQ ID NO: 25609 - protein, 16 aa, Severe acute respiratory syndrome-related coronavirus
  REGION 1..16: note = Table B: HLA-DQA1*05:05-B1*03:01L
  source 1..16: note = Severe acute respiratory syndrome coronavirus 2
LNQLESKMSGKGQQQQ

SEQ ID NO: 25610 - protein, 15 aa, Severe acute respiratory syndrome-related coronavirus
  REGION 1..15: note = Table B: HLA-DQA1*05:05-B1*03:01L
  source 1..15: note = Severe acute respiratory syndrome coronavirus 2
IGMEVTPSGTWLTYT

SEQ ID NO: 25611 - protein, 14 aa, Severe acute respiratory syndrome-related coronavirus
  REGION 1..14: note = Table B: HLA-DQA1*05:05-B1*03:01L
  source 1..14: note = Severe acute respiratory syndrome coronavirus 2
EVTPSGTWLTYTGA

SEQ ID NO: 25612 - protein, 14 aa, Severe acute respiratory syndrome-related coronavirus
  REGION 1..14: note = Table B: HLA-DQA1*05:05-B1*03:01L
  source 1..14: note = Severe acute respiratory syndrome coronavirus 2
VTPSGTWLTYTGAI

SEQ ID NO: 25613 - protein, 15 aa, Severe acute respiratory syndrome-related coronavirus
  REGION 1..15: note = Table B: HLA-DQA1*05:05-B1*03:01L HLA-DQA1*01:03-B1*06:01L
  source 1..15: note = Severe acute respiratory syndrome coronavirus 2
KQLQQSMSSADSTQA

SEQ ID NO: 25614 - protein, 12 aa, Severe acute respiratory syndrome-related coronavirus
  REGION 1..12: note = Table B: HLA-DRB1*14:17L
  source 1..12: note = Severe acute respiratory syndrome coronavirus 2
KGVLPQLEQPYV

SEQ ID NO: 25615 - protein, 11 aa, Severe acute respiratory syndrome-related coronavirus
  REGION 1..11: note = Table B: HLA-DRB1*14:17L HLA-DRB1*04:08L
  source 1..11: note = Severe acute respiratory syndrome coronavirus 2
IQYGRSGETLG

SEQ ID NO: 25616 - protein, 11 aa, Severe acute respiratory syndrome-related coronavirus
  REGION 1..11: note = Table B: HLA-DRB1*14:17L
  source 1..11: note = Severe acute respiratory syndrome coronavirus 2
SIFSRTLETAQ

SEQ ID NO: 25617 - protein, 13 aa, Severe acute respiratory syndrome-related coronavirus
  REGION 1..13: note = Table B: HLA-DRB1*14:17L HLA-DPA1*01:02-B1*04:01L HLA-DRB1*08:03L
  source 1..13: note = Severe acute respiratory syndrome coronavirus 2
GGQIVTCAKEIKE

SEQ ID NO: 25618 - protein, 12 aa, Severe acute respiratory syndrome-related coronavirus
  REGION 1..12: note = Table B: HLA-DRB1*14:17L
  source 1..12: note = Severe acute respiratory syndrome coronavirus 2
VVADAVIKTLQP

SEQ ID NO: 25619 - protein, 12 aa, Severe acute respiratory syndrome-related coronavirus
  REGION 1..12: note = Table B: HLA-DRB1*14:17L
  source 1..12: note = Severe acute respiratory syndrome coronavirus 2
SGYLKLTDNVYI

SEQ ID NO: 25620 - protein, 12 aa, Severe acute respiratory syndrome-related coronavirus
  REGION 1..12: note = Table B: HLA-DRB1*14:17L
  source 1..12: note = Severe acute respiratory syndrome coronavirus 2
GADVTKIKPHNS

SEQ ID NO: 25621 - protein, 11 aa, Severe acute respiratory syndrome-related coronavirus
  REGION 1..11: note = Table B: HLA-DRB1*14:17L
  source 1..11: note = Severe acute respiratory syndrome coronavirus 2
IKFADDLNQLT

SEQ ID NO: 25622 - protein, 11 aa, Severe acute respiratory syndrome-related coronavirus
  REGION 1..11: note = Table B: HLA-DRB1*14:17L
  source 1..11: note = Severe acute respiratory syndrome coronavirus 2
LTGYKKPASRE

SEQ ID NO: 25623 - protein, 13 aa, Severe acute respiratory syndrome-related coronavirus
  REGION 1..13: note = Table B: HLA-DRB1*14:17L HLA-DRB1*16:01L
  source 1..13: note = Severe acute respiratory syndrome coronavirus 2
TTEVVGDIILKPA

SEQ ID NO: 25624 - protein, 12 aa, Severe acute respiratory syndrome-related coronavirus
  REGION 1..12: note = Table B: HLA-DRB1*14:17L
  source 1..12: note = Severe acute respiratory syndrome coronavirus 2
NNSLKITEEVGH

SEQ ID NO: 25625 - protein, 12 aa, Severe acute respiratory syndrome-related coronavirus
  REGION 1..12: note = Table B: HLA-DRB1*14:17L
  source 1..12: note = Severe acute respiratory syndrome coronavirus 2
SSAKSASVYYSQ

SEQ ID NO: 25626 - protein, 13 aa, Severe acute respiratory syndrome-related coronavirus
  REGION 1..13: note = Table B: HLA-DRB1*14:17L
  source 1..13: note = Severe acute respiratory syndrome coronavirus 2
LDQALVSDVGDSA

SEQ ID NO: 25627 - protein, 12 aa, Severe acute respiratory syndrome-related coronavirus
  REGION 1..12: note = Table B: HLA-DRB1*14:17L
  source 1..12: note = Severe acute respiratory syndrome coronavirus 2
ALVSDVGDSAEV

SEQ ID NO: 25628 - protein, 13 aa, Severe acute respiratory syndrome-related coronavirus
  REGION 1..13: note = Table B: HLA-DRB1*14:17L
  source 1..13: note = Severe acute respiratory syndrome coronavirus 2
TRDIASTDTCFAN

SEQ ID NO: 25629 - protein, 13 aa, Severe acute respiratory syndrome-related coronavirus
  REGION 1..13: note = Table B: HLA-DRB1*14:17L HLA-DRB1*16:01L
  source 1..13: note = Severe acute respiratory syndrome coronavirus 2
ADFDTWFSQRGGS

SEQ ID NO: 25630 - protein, 13 aa, Severe acute respiratory syndrome-related coronavirus
  REGION 1..13: note = Table B: HLA-DRB1*14:17L
  source 1..13: note = Severe acute respiratory syndrome coronavirus 2
IGALDISASIVAG

SEQ ID NO: 25631 - protein, 13 aa, Severe acute respiratory syndrome-related coronavirus
  REGION 1..13: note = Table B: HLA-DRB1*14:17L
  source 1..13: note = Severe acute respiratory syndrome coronavirus 2
GALDISASIVAGG

SEQ ID NO: 25632 - protein, 11 aa, Severe acute respiratory syndrome-related coronavirus
  REGION 1..11: note = Table B: HLA-DRB1*14:17L
  source 1..11: note = Severe acute respiratory syndrome coronavirus 2
DVLLPLTQYNR

SEQ ID NO: 25633 - protein, 12 aa, Severe acute respiratory syndrome-related coronavirus
  REGION 1..12: note = Table B: HLA-DRB1*14:17L
  source 1..12: note = Severe acute respiratory syndrome coronavirus 2
HVDILGPLSAQT

SEQ ID NO: 25634 - protein, 11 aa, Severe acute respiratory syndrome-related coronavirus
  REGION 1..11: note = Table B: HLA-DRB1*14:17L
  source 1..11: note = Severe acute respiratory syndrome coronavirus 2
IKVATVQSKMS

SEQ ID NO: 25635 - protein, 11 aa, Severe acute respiratory syndrome-related coronavirus
  REGION 1..11: note = Table B: HLA-DRB1*14:17L
  source 1..11: note = Severe acute respiratory syndrome coronavirus 2
ELSPVALRQMS

SEQ ID NO: 25636 - protein, 12 aa, Severe acute respiratory syndrome-related coronavirus
  REGION 1..12: note = Table B: HLA-DRB1*14:17L
  source 1..12: note = Severe acute respiratory syndrome coronavirus 2
ATEVPANSTVLS

SEQ ID NO: 25637 - protein, 13 aa, Severe acute respiratory syndrome-related coronavirus
  REGION 1..13: note = Table B: HLA-DRB1*14:17L HLA-DRB1*04:08L
  source 1..13: note = Severe acute respiratory syndrome coronavirus 2
AAKAYKDYLASGG

SEQ ID NO: 25638 - protein, 10 aa, Severe acute respiratory syndrome-related coronavirus
  REGION 1..10: note = Table B: HLA-DRB1*14:17L
  source 1..10: note = Severe acute respiratory syndrome coronavirus 2
LRVYANLGER

SEQ ID NO: 25639 - protein, 11 aa, Severe acute respiratory syndrome-related coronavirus
  REGION 1..11: note = Table B: HLA-DRB1*14:17L
  source 1..11: note = Severe acute respiratory syndrome coronavirus 2
ANVNALLSTDG

SEQ ID NO: 25640 - protein, 10 aa, Severe acute respiratory syndrome-related coronavirus
  REGION 1..10: note = Table B: HLA-DRB1*14:17L
  source 1..10: note = Severe acute respiratory syndrome coronavirus 2
LQGPPGTGKS

SEQ ID NO: 25641 - protein, 11 aa, Severe acute respiratory syndrome-related coronavirus
  REGION 1..11: note = Table B: HLA-DRB1*14:17L
  source 1..11: note = Severe acute respiratory syndrome coronavirus 2
FKVNSTLEQYV

SEQ ID NO: 25642 - protein, 13 aa, Severe acute respiratory syndrome-related coronavirus
  REGION 1..13: note = Table B: HLA-DRB1*14:17L HLA-DRB1*04:08L
  source 1..13: note = Severe acute respiratory syndrome coronavirus 2
NYQVNGYPNMFIT

SEQ ID NO: 25643 - protein, 11 aa, Severe acute respiratory syndrome-related coronavirus
  REGION 1..11: note = Table B: HLA-DRB1*14:17L
  source 1..11: note = Severe acute respiratory syndrome coronavirus 2
HAIHVSGTNGT

SEQ ID NO: 25644 - protein, 11 aa, Severe acute respiratory syndrome-related coronavirus
  REGION 1..11: note = Table B: HLA-DRB1*14:17L
  source 1..11: note = Severe acute respiratory syndrome coronavirus 2
TTLDSKTQSLL

SEQ ID NO: 25645 - protein, 13 aa, Severe acute respiratory syndrome-related coronavirus
  REGION 1..13: note = Table B: HLA-DRB1*14:17L
  source 1..13: note = Severe acute respiratory syndrome coronavirus 2
GGVSVITPGTNTS

SEQ ID NO: 25646 - protein, 15 aa, Severe acute respiratory syndrome-related coronavirus
  REGION 1..15: note = Table B: HLA-DRB1*14:17L
  source 1..15: note = Severe acute respiratory syndrome coronavirus 2
AGFIKQYGDCLGDIA

SEQ ID NO: 25647 - protein, 15 aa, Severe acute respiratory syndrome-related coronavirus
  REGION 1..15: note = Table B: HLA-DRB1*14:17L
  source 1..15: note = Severe acute respiratory syndrome coronavirus 2
LPPLLTDEMIAQYTS

SEQ ID NO: 25648 - protein, 12 aa, Severe acute respiratory syndrome-related coronavirus
  REGION 1..12: note = Table B: HLA-DRB1*14:17L
  source 1..12: note = Severe acute respiratory syndrome coronavirus 2
QGEIKDATPSDF

SEQ ID NO: 25649 - protein, 11 aa, Severe acute respiratory syndrome-related coronavirus
  REGION 1..11: note = Table B: HLA-DRB1*14:17L
  source 1..11: note = Severe acute respiratory syndrome coronavirus 2
YVYSRVKNLNS

SEQ ID NO: 25650 - protein, 11 aa, Severe acute respiratory syndrome-related coronavirus
  REGION 1..11: note = Table B: HLA-DRB1*14:17L
  source 1..11: note = Severe acute respiratory syndrome coronavirus 2
YSRVKNLNSSR

SEQ ID NO: 25651 - protein, 11 aa, Severe acute respiratory syndrome-related coronavirus
  REGION 1..11: note = Table B: HLA-DRB1*14:17L
  source 1..11: note = Severe acute respiratory syndrome coronavirus 2
YRINWITGGIA

SEQ ID NO: 25652 - protein, 11 aa, Severe acute respiratory syndrome-related coronavirus
  REGION 1..11: note = Table B: HLA-DRB1*14:17L HLA-DQA1*02:01-B1*03:03L
  source 1..11: note = Severe acute respiratory syndrome coronavirus 2
SELVIGAVILR

SEQ ID NO: 25653 - protein, 13 aa, Severe acute respiratory syndrome-related coronavirus
  REGION 1..13: note = Table B: HLA-DRB1*14:17L
  source 1..13: note = Severe acute respiratory syndrome coronavirus 2
ASQRVAGDSGFAA

SEQ ID NO: 25654 - protein, 11 aa, Severe acute respiratory syndrome-related coronavirus
  REGION 1..11: note = Table B: HLA-DRB1*14:17L
  source 1..11: note = Severe acute respiratory syndrome coronavirus 2
IKNLSKSLTEN

SEQ ID NO: 25655 - protein, 11 aa, Severe acute respiratory syndrome-related coronavirus
  REGION 1..11: note = Table B: HLA-DPA1*01:02-B1*04:01L HLA-DQA1*02:01-B1*03:03L HLA-DRB1*15:03L
  source 1..11: note = Severe acute respiratory syndrome coronavirus 2
GEIPVAYRKVL

SEQ ID NO: 25656 - protein, 12 aa, Severe acute respiratory syndrome-related coronavirus
  REGION 1..12: note = Table B: HLA-DPA1*01:02-B1*04:01L
  source 1..12: note = Severe acute respiratory syndrome coronavirus 2
SEVGPEHSLAEY

SEQ ID NO: 25657 - protein, 11 aa, Severe acute respiratory syndrome-related coronavirus
  REGION 1..11: note = Table B: HLA-DPA1*01:02-B1*04:01L HLA-DQA1*01:03-B1*06:01L
  source 1..11: note = Severe acute respiratory syndrome coronavirus 2
LNDNLLEILQK

SEQ ID NO: 25658 - protein, 10 aa, Severe acute respiratory syndrome-related coronavirus
  REGION 1..10: note = Table B: HLA-DPA1*01:02-B1*04:01L
  source 1..10: note = Severe acute respiratory syndrome coronavirus 2
DYKAFKQIVE

SEQ ID NO: 25659 - protein, 11 aa, Severe acute respiratory syndrome-related coronavirus
  REGION 1..11: note = Table B: HLA-DPA1*01:02-B1*04:01L
  source 1..11: note = Severe acute respiratory syndrome coronavirus 2
SEAARVVRSIF

SEQ ID NO: 25660 - protein, 10 aa, Severe acute respiratory syndrome-related coronavirus
  REGION 1..10: note = Table B: HLA-DPA1*01:02-B1*04:01L
  source 1..10: note = Severe acute respiratory syndrome coronavirus 2
FGTVYEKLKP

SEQ ID NO: 25661 - protein, 10 aa, Severe acute respiratory syndrome-related coronavirus
  REGION 1..10: note = Table B: HLA-DPA1*01:02-B1*04:01L
  source 1..10: note = Severe acute respiratory syndrome coronavirus 2
GTVYEKLKPV

SEQ ID NO: 25662 - protein, 10 aa, Severe acute respiratory syndrome-related coronavirus
  REGION 1..10: note = Table B: HLA-DPA1*01:02-B1*04:01L
  source 1..10: note = Severe acute respiratory syndrome coronavirus 2
DWLEEKFKEG

SEQ ID NO: 25663 - protein, 10 aa, Severe acute respiratory syndrome-related coronavirus
  REGION 1..10: note = Table B: HLA-DPA1*01:02-B1*04:01L
  source 1..10: note = Severe acute respiratory syndrome coronavirus 2
SVQTFFKLVN

SEQ ID NO: 25664 - protein, 10 aa, Severe acute respiratory syndrome-related coronavirus
  REGION 1..10: note = Table B: HLA-DPA1*01:02-B1*04:01L HLA-DRB1*16:01L HLA-DQA1*01:03-B1*06:01L HLA-DRB1*15:03L
  source 1..10: note = Severe acute respiratory syndrome coronavirus 2
TFFKLVNKFL

SEQ ID NO: 25665 - protein, 10 aa, Severe acute respiratory syndrome-related coronavirus
  REGION 1..10: note = Table B: HLA-DPA1*01:02-B1*04:01L HLA-DQA1*01:03-B1*06:01L
  source 1..10: note = Severe acute respiratory syndrome coronavirus 2
SFSGYLKLTD

SEQ ID NO: 25666 - protein, 10 aa, Severe acute respiratory syndrome-related coronavirus
  REGION 1..10: note = Table B: HLA-DPA1*01:02-B1*04:01L
  source 1..10: note = Severe acute respiratory syndrome coronavirus 2
RVEAFEYYHT

SEQ ID NO: 25667 - protein, 11 aa, Severe acute respiratory syndrome-related coronavirus
  REGION 1..11: note = Table B: HLA-DPA1*01:02-B1*04:01L HLA-DQA1*02:01-B1*03:03L
  source 1..11: note = Severe acute respiratory syndrome coronavirus 2
ETMSYLFQHAN

SEQ ID NO: 25668 - protein, 12 aa, Severe acute respiratory syndrome-related coronavirus
  REGION 1..12: note = Table B: HLA-DPA1*01:02-B1*04:01L HLA-DRB1*16:01L
  source 1..12: note = Severe acute respiratory syndrome coronavirus 2
TGNYQCGHYKHI

SEQ ID NO: 25669 - protein, 10 aa, Severe acute respiratory syndrome-related coronavirus
  REGION 1..10: note = Table B: HLA-DPA1*01:02-B1*04:01L
  source 1..10: note = Severe acute respiratory syndrome coronavirus 2
YQCGHYKHIT

SEQ ID NO: 25670 - protein, 14 aa, Severe acute respiratory syndrome-related coronavirus
  REGION 1..14: note = Table B: HLA-DPA1*01:02-B1*04:01L
  source 1..14: note = Severe acute respiratory syndrome coronavirus 2
TSNSFDVLKSEDAQ

SEQ ID NO: 25671 - protein, 13 aa, Severe acute respiratory syndrome-related coronavirus
  REGION 1..13: note = Table B: HLA-DPA1*01:02-B1*04:01L
  source 1..13: note = Severe acute respiratory syndrome coronavirus 2
TIAKNTVKSVGKF

SEQ ID NO: 25672 - protein, 10 aa, Severe acute respiratory syndrome-related coronavirus
  REGION 1..10: note = Table B: HLA-DPA1*01:02-B1*04:01L
  source 1..10: note = Severe acute respiratory syndrome coronavirus 2
ITISSFKWDL

SEQ ID NO: 25673 - protein, 10 aa, Severe acute respiratory syndrome-related coronavirus
  REGION 1..10: note = Table B: HLA-DPA1*01:02-B1*04:01L HLA-DRB1*16:01L
  source 1..10: note = Severe acute respiratory syndrome coronavirus 2
FYYVWKSYVH

SEQ ID NO: 25674 - protein, 10 aa, Severe acute respiratory syndrome-related coronavirus
  REGION 1..10: note = Table B: HLA-DPA1*01:02-B1*04:01L
  source 1..10: note = Severe acute respiratory syndrome coronavirus 2
VWKSYVHVVD

SEQ ID NO: 25675 - protein, 11 aa, Severe acute respiratory syndrome-related coronavirus
  REGION 1..11: note = Table B: HLA-DPA1*01:02-B1*04:01L
  source 1..11: note = Severe acute respiratory syndrome coronavirus 2
HINAQVAKSHN

SEQ ID NO: 25676 - protein, 11 aa, Severe acute respiratory syndrome-related coronavirus
  REGION 1..11: note = Table B: HLA-DPA1*01:02-B1*04:01L HLA-DQA1*01:03-B1*06:01L
  source 1..11: note = Severe acute respiratory syndrome coronavirus 2
TNGDFLHFLPR

SEQ ID NO: 25677 - protein, 10 aa, Severe acute respiratory syndrome-related coronavirus
  REGION 1..10: note = Table B: HLA-DPA1*01:02-B1*04:01L
  source 1..10: note = Severe acute respiratory syndrome coronavirus 2
FLPRVFSAVG

SEQ ID NO: 25678 - protein, 11 aa, Severe acute respiratory syndrome-related coronavirus
  REGION 1..11: note = Table B: HLA-DPA1*01:02-B1*04:01L
  source 1..11: note = Severe acute respiratory syndrome coronavirus 2
LAYYFMRFRRA

SEQ ID NO: 25679 - protein, 12 aa, Severe acute respiratory syndrome-related coronavirus
  REGION 1..12: note = Table B: HLA-DPA1*01:02-B1*04:01L
  source 1..12: note = Severe acute respiratory syndrome coronavirus 2
ISTKHFYWFFSN

SEQ ID NO: 25680 - protein, 11 aa, Severe acute respiratory syndrome-related coronavirus
  REGION 1..11: note = Table B: HLA-DPA1*01:02-B1*04:01L
  source 1..11: note = Severe acute respiratory syndrome coronavirus 2
GVSFSTFEEAA

SEQ ID NO: 25681 - protein, 10 aa, Severe acute respiratory syndrome-related coronavirus
  REGION 1..10: note = Table B: HLA-DPA1*01:02-B1*04:01L
  source 1..10: note = Severe acute respiratory syndrome coronavirus 2
LPLTQYNRYL

SEQ ID NO: 25682 - protein, 11 aa, Severe acute respiratory syndrome-related coronavirus
  REGION 1..11: note = Table B: HLA-DPA1*01:02-B1*04:01L
  source 1..11: note = Severe acute respiratory syndrome coronavirus 2
YDCVSFCYMHH

SEQ ID NO: 25683 - protein, 10 aa, Severe acute respiratory syndrome-related coronavirus
  REGION 1..10: note = Table B: HLA-DPA1*01:02-B1*04:01L
  source 1..10: note = Severe acute respiratory syndrome coronavirus 2
RWFLNRFTTT

SEQ ID NO: 25684 - protein, 10 aa, Severe acute respiratory syndrome-related coronavirus
  REGION 1..10: note = Table B: HLA-DPA1*01:02-B1*04:01L
  source 1..10: note = Severe acute respiratory syndrome coronavirus 2
RVWTLMNVLT

SEQ ID NO: 25685 - protein, 11 aa, Severe acute respiratory syndrome-related coronavirus
  REGION 1..11: note = Table B: HLA-DPA1*01:02-B1*04:01L
  source 1..11: note = Severe acute respiratory syndrome coronavirus 2
TLVYKVYYGNA

SEQ ID NO: 25686 - protein, 10 aa, Severe acute respiratory syndrome-related coronavirus
  REGION 1..10: note = Table B: HLA-DPA1*01:02-B1*04:01L HLA-DQA1*01:03-B1*06:01L
  source 1..10: note = Severe acute respiratory syndrome coronavirus 2
VSTQEFRYMN

SEQ ID NO: 25687 - protein, 16 aa, Severe acute respiratory syndrome-related coronavirus
  REGION 1..16: note = Table B: HLA-DPA1*01:02-B1*04:01L
  source 1..16: note = Severe acute respiratory syndrome coronavirus 2
TAQEAYEQAVANGDSE

SEQ ID NO: 25688 - protein, 10 aa, Severe acute respiratory syndrome-related coronavirus
  REGION 1..10: note = Table B: HLA-DPA1*01:02-B1*04:01L
  source 1..10: note = Severe acute respiratory syndrome coronavirus 2
MLFTMLRKLD

SEQ ID NO: 25689 - protein, 16 aa, Severe acute respiratory syndrome-related coronavirus
  REGION 1..16: note = Table B: HLA-DPA1*01:02-B1*04:01L
  source 1..16: note = Severe acute respiratory syndrome coronavirus 2
ASALWEIQQVVDADSK

SEQ ID NO: 25690 - protein, 11 aa, Severe acute respiratory syndrome-related coronavirus
  REGION 1..11: note = Table B: HLA-DPA1*01:02-B1*04:01L HLA-DRB1*07:01L HLA-DQA1*01:03-B1*06:01L
  source 1..11: note = Severe acute respiratory syndrome coronavirus 2
QVVDADSKIVQ

SEQ ID NO: 25691 - protein, 15 aa, Severe acute respiratory syndrome-related coronavirus
  REGION 1..15: note = Table B: HLA-DPA1*01:02-B1*04:01L
  source 1..15: note = Severe acute respiratory syndrome coronavirus 2
TDDNALAYYNTTKGG

SEQ ID NO: 25692 - protein, 11 aa, Severe acute respiratory syndrome-related coronavirus
  REGION 1..11: note = Table B: HLA-DPA1*01:02-B1*04:01L
  source 1..11: note = Severe acute respiratory syndrome coronavirus 2
DLQDLKWARFP

SEQ ID NO: 25693 - protein, 11 aa, Severe acute respiratory syndrome-related coronavirus
  REGION 1..11: note = Table B: HLA-DPA1*01:02-B1*04:01L
  source 1..11: note = Severe acute respiratory syndrome coronavirus 2
LQDLKWARFPK

SEQ ID NO: 25694 - protein, 10 aa, Severe acute respiratory syndrome-related coronavirus
  REGION 1..10: note = Table B: HLA-DPA1*01:02-B1*04:01L
  source 1..10: note = Severe acute respiratory syndrome coronavirus 2
LKWARFPKSD

SEQ ID NO: 25695 - protein, 11 aa, Severe acute respiratory syndrome-related coronavirus
  REGION 1..11: note = Table B: HLA-DPA1*01:02-B1*04:01L HLA-DQA1*01:03-B1*06:01L
  source 1..11: note = Severe acute respiratory syndrome coronavirus 2
NATEVPANSTV

SEQ ID NO: 25696 - protein, 11 aa, Severe acute respiratory syndrome-related coronavirus
  REGION 1..11: note = Table B: HLA-DPA1*01:02-B1*04:01L
  source 1..11: note = Severe acute respiratory syndrome coronavirus 2
DVVYRAFDIYN

SEQ ID NO: 25697 - protein, 11 aa, Severe acute respiratory syndrome-related coronavirus
  REGION 1..11: note = Table B: HLA-DPA1*01:02-B1*04:01L
  source 1..11: note = Severe acute respiratory syndrome coronavirus 2
VVYRAFDIYND

SEQ ID NO: 25698 - protein, 11 aa, Severe acute respiratory syndrome-related coronavirus
  REGION 1..11: note = Table B: HLA-DPA1*01:02-B1*04:01L
  source 1..11: note = Severe acute respiratory syndrome coronavirus 2
KVAGFAKFLKT

SEQ ID NO: 25699 - protein, 11 aa, Severe acute respiratory syndrome-related coronavirus
  REGION 1..11: note = Table B: HLA-DPA1*01:02-B1*04:01L
  source 1..11: note = Severe acute respiratory syndrome coronavirus 2
YTMADLVYALR

SEQ ID NO: 25700 - protein, 11 aa, Severe acute respiratory syndrome-related coronavirus
  REGION 1..11: note = Table B: HLA-DPA1*01:02-B1*04:01L
  source 1..11: note = Severe acute respiratory syndrome coronavirus 2
LKTVQFCDAMR

SEQ ID NO: 25701 - protein, 10 aa, Severe acute respiratory syndrome-related coronavirus
  REGION 1..10: note = Table B: HLA-DPA1*01:02-B1*04:01L
  source 1..10: note = Severe acute respiratory syndrome coronavirus 2
YHFRELGVVH

SEQ ID NO: 25702 - protein, 12 aa, Severe acute respiratory syndrome-related coronavirus
  REGION 1..12: note = Table B: HLA-DPA1*01:02-B1*04:01L HLA-DRB1*16:01L
  source 1..12: note = Severe acute respiratory syndrome coronavirus 2
FNKDFYDFAVSK

SEQ ID NO: 25703 - protein, 10 aa, Severe acute respiratory syndrome-related coronavirus
  REGION 1..10: note = Table B: HLA-DPA1*01:02-B1*04:01L
  source 1..10: note = Severe acute respiratory syndrome coronavirus 2
YDYYRYNLPT

SEQ ID NO: 25704 - protein, 10 aa, Severe acute respiratory syndrome-related coronavirus
  REGION 1..10: note = Table B: HLA-DPA1*01:02-B1*04:01L
  source 1..10: note = Severe acute respiratory syndrome coronavirus 2
FYGGWHNMLK

SEQ ID NO: 25705 - protein, 17 aa, Severe acute respiratory syndrome-related coronavirus
  REGION 1..17: note = Table B: HLA-DPA1*01:02-B1*04:01L
  source 1..17: note = Severe acute respiratory syndrome coronavirus 2
MPNMLRIMASLVLARKH

SEQ ID NO: 25706 - protein, 16 aa, Severe acute respiratory syndrome-related coronavirus
  REGION 1..16: note = Table B: HLA-DPA1*01:02-B1*04:01L HLA-DRB1*10:01L
  source 1..16: note = Severe acute respiratory syndrome coronavirus 2
HRFYRLANECAQVLSE

SEQ ID NO: 25707 - protein, 10 aa, Severe acute respiratory syndrome-related coronavirus
  REGION 1..10: note = Table B: HLA-DPA1*01:02-B1*04:01L
  source 1..10: note = Severe acute respiratory syndrome coronavirus 2
VNEFYAYLRK

SEQ ID NO: 25708 - protein, 10 aa, Severe acute respiratory syndrome-related coronavirus
  REGION 1..10: note = Table B: HLA-DPA1*01:02-B1*04:01L
  source 1..10: note = Severe acute respiratory syndrome coronavirus 2
NEFYAYLRKH

SEQ ID NO: 25709 - protein, 10 aa, Severe acute respiratory syndrome-related coronavirus
  REGION 1..10: note = Table B: HLA-DPA1*01:02-B1*04:01L
  source 1..10: note = Severe acute respiratory syndrome coronavirus 2
FKSVLYYQNN

SEQ ID NO: 25710 - protein, 15 aa, Severe acute respiratory syndrome-related coronavirus
  REGION 1..15: note = Table B: HLA-DPA1*01:02-B1*04:01L
  source 1..15: note = Severe acute respiratory syndrome coronavirus 2
VKQGDDYVYLPYPDP

SEQ ID NO: 25711 - protein, 10 aa, Severe acute respiratory syndrome-related coronavirus
  REGION 1..10: note = Table B: HLA-DPA1*01:02-B1*04:01L
  source 1..10: note = Severe acute respiratory syndrome coronavirus 2
VFHLYLQYIR

SEQ ID NO: 25712 - protein, 11 aa, Severe acute respiratory syndrome-related coronavirus
  REGION 1..11: note = Table B: HLA-DPA1*01:02-B1*04:01L
  source 1..11: note = Severe acute respiratory syndrome coronavirus 2
VMLTNDNTSRY

SEQ ID NO: 25713 - protein, 11 aa, Severe acute respiratory syndrome-related coronavirus
  REGION 1..11: note = Table B: HLA-DPA1*01:02-B1*04:01L
  source 1..11: note = Severe acute respiratory syndrome coronavirus 2
DAVVYRGTTTY

SEQ ID NO: 25714 - protein, 11 aa, Severe acute respiratory syndrome-related coronavirus
  REGION 1..11: note = Table B: HLA-DPA1*01:02-B1*04:01L
  source 1..11: note = Severe acute respiratory syndrome coronavirus 2
AVVYRGTTTYK

SEQ ID NO: 25715 - protein, 10 aa, Severe acute respiratory syndrome-related coronavirus
  REGION 1..10: note = Table B: HLA-DPA1*01:02-B1*04:01L
  source 1..10: note = Severe acute respiratory syndrome coronavirus 2
VGDYFVLTSH

SEQ ID NO: 25716 - protein, 10 aa, Severe acute respiratory syndrome-related coronavirus
  REGION 1..10: note = Table B: HLA-DPA1*01:02-B1*04:01L
  source 1..10: note = Severe acute respiratory syndrome coronavirus 2
LRAKHYVYIG

SEQ ID NO: 25717 - protein, 13 aa, Severe acute respiratory syndrome-related coronavirus
  REGION 1..13: note = Table B: HLA-DPA1*01:02-B1*04:01L HLA-DRB1*10:01L HLA-DRB1*08:03L
  source 1..13: note = Severe acute respiratory syndrome coronavirus 2
SALVYDNKLKAHK

SEQ ID NO: 25718 - protein, 10 aa, Severe acute respiratory syndrome-related coronavirus
  REGION 1..10: note = Table B: HLA-DPA1*01:02-B1*04:01L
  source 1..10: note = Severe acute respiratory syndrome coronavirus 2
VTGLFKDCSK

SEQ ID NO: 25719 - protein, 12 aa, Severe acute respiratory syndrome-related coronavirus
  REGION 1..12: note = Table B: HLA-DPA1*01:02-B1*04:01L HLA-DRB1*04:08L
  source 1..12: note = Severe acute respiratory syndrome coronavirus 2
DQFKHLIPLMYK

SEQ ID NO: 25720 - protein, 11 aa, Severe acute respiratory syndrome-related coronavirus
  REGION 1..11: note = Table B: HLA-DPA1*01:02-B1*04:01L
  source 1..11: note = Severe acute respiratory syndrome coronavirus 2
VQMLSDTLKNL

SEQ ID NO: 25721 - protein, 11 aa, Severe acute respiratory syndrome-related coronavirus
  REGION 1..11: note = Table B: HLA-DPA1*01:02-B1*04:01L
  source 1..11: note = Severe acute respiratory syndrome coronavirus 2
DRVVFVLWAHG

SEQ ID NO: 25722 - protein, 11 aa, Severe acute respiratory syndrome-related coronavirus
  REGION 1..11: note = Table B: HLA-DPA1*01:02-B1*04:01L
  source 1..11: note = Severe acute respiratory syndrome coronavirus 2
FELTSMKYFVK

SEQ ID NO: 25723 - protein, 11 aa, Severe acute respiratory syndrome-related coronavirus
  REGION 1..11: note = Table B: HLA-DPA1*01:02-B1*04:01L
  source 1..11: note = Severe acute respiratory syndrome coronavirus 2
SMKYFVKIGPE

SEQ ID NO: 25724 - protein, 17 aa, Severe acute respiratory syndrome-related coronavirus
  REGION 1..17: note = Table B: HLA-DPA1*01:02-B1*04:01L
  source 1..17: note = Severe acute respiratory syndrome coronavirus 2
DTRVLSNLNLPGCDGGS

SEQ ID NO: 25725 - protein, 13 aa, Severe acute respiratory syndrome-related coronavirus
  REGION 1..13: note = Table B: HLA-DPA1*01:02-B1*04:01L
  source 1..13: note = Severe acute respiratory syndrome coronavirus 2
SAGFSLWVYKQFD

SEQ ID NO: 25726 - protein, 10 aa, Severe acute respiratory syndrome-related coronavirus
  REGION 1..10: note = Table B: HLA-DPA1*01:02-B1*04:01L
  source 1..10: note = Severe acute respiratory syndrome coronavirus 2
LWNTFTRLQS

SEQ ID NO: 25727 - protein, 10 aa, Severe acute respiratory syndrome-related coronavirus
  REGION 1..10: note = Table B: HLA-DPA1*01:02-B1*04:01L
  source 1..10: note = Severe acute respiratory syndrome coronavirus 2
WNTFTRLQSL

SEQ ID NO: 25728 - protein, 10 aa, Severe acute respiratory syndrome-related coronavirus
  REGION 1..10: note = Table B: HLA-DPA1*01:02-B1*04:01L
  source 1..10: note = Severe acute respiratory syndrome coronavirus 2
VAFELWAKRN

SEQ ID NO: 25729 - protein, 10 aa, Severe acute respiratory syndrome-related coronavirus
  REGION 1..10: note = Table B: HLA-DPA1*01:02-B1*04:01L
  source 1..10: note = Severe acute respiratory syndrome coronavirus 2
TQFNYYKKVD

SEQ ID NO: 25730 - protein, 10 aa, Severe acute respiratory syndrome-related coronavirus
  REGION 1..10: note = Table B: HLA-DPA1*01:02-B1*04:01L
  source 1..10: note = Severe acute respiratory syndrome coronavirus 2
FEHIVYGDFS

SEQ ID NO: 25731 - protein, 10 aa, Severe acute respiratory syndrome-related coronavirus
  REGION 1..10: note = Table B: HLA-DPA1*01:02-B1*04:01L
  source 1..10: note = Severe acute respiratory syndrome coronavirus 2
RFKESPFELE

SEQ ID NO: 25732 - protein, 10 aa, Severe acute respiratory syndrome-related coronavirus
  REGION 1..10: note = Table B: HLA-DPA1*01:02-B1*04:01L
  source 1..10: note = Severe acute respiratory syndrome coronavirus 2
FKESPFELED

SEQ ID NO: 25733 - protein, 11 aa, Severe acute respiratory syndrome-related coronavirus
  REGION 1..11: note = Table B: HLA-DPA1*01:02-B1*04:01L
  source 1..11: note = Severe acute respiratory syndrome coronavirus 2
ISFMLWCKDGH

SEQ ID NO: 25734 - protein, 17 aa, Severe acute respiratory syndrome-related coronavirus
  REGION 1..17: note = Table B: HLA-DPA1*01:02-B1*04:01L
  source 1..17: note = Severe acute respiratory syndrome coronavirus 2
DADSTLIGDCATVHTAN

SEQ ID NO: 25735 - protein, 13 aa, Severe acute respiratory syndrome-related coronavirus
  REGION 1..13: note = Table B: HLA-DPA1*01:02-B1*04:01L
  source 1..13: note = Severe acute respiratory syndrome coronavirus 2
WDLIISDMYDPKT

SEQ ID NO: 25736 - protein, 11 aa, Severe acute respiratory syndrome-related coronavirus
  REGION 1..11: note = Table B: HLA-DPA1*01:02-B1*04:01L
  source 1..11: note = Severe acute respiratory syndrome coronavirus 2
YVMHANYIFWR

SEQ ID NO: 25737 - protein, 11 aa, Severe acute respiratory syndrome-related coronavirus
  REGION 1..11: note = Table B: HLA-DPA1*01:02-B1*04:01L
  source 1..11: note = Severe acute respiratory syndrome coronavirus 2
KVFRSSVLHST

SEQ ID NO: 25738 - protein, 10 aa, Severe acute respiratory syndrome-related coronavirus
  REGION 1..10: note = Table B: HLA-DPA1*01:02-B1*04:01L
  source 1..10: note = Severe acute respiratory syndrome coronavirus 2
SNVTWFHAIH

SEQ ID NO: 25739 - protein, 10 aa, Severe acute respiratory syndrome-related coronavirus
  REGION 1..10: note = Table B: HLA-DPA1*01:02-B1*04:01L HLA-DQA1*01:03-B1*06:01L
  source 1..10: note = Severe acute respiratory syndrome coronavirus 2
IIRGWIFGTT

SEQ ID NO: 25740 - protein, 12 aa, Severe acute respiratory syndrome-related coronavirus
  REGION 1..12: note = Table B: HLA-DPA1*01:02-B1*04:01L HLA-DQA1*01:03-B1*06:01L
  source 1..12: note = Severe acute respiratory syndrome coronavirus 2
FQFCNDPFLGVY

SEQ ID NO: 25741 - protein, 12 aa, Severe acute respiratory syndrome-related coronavirus
  REGION 1..12: note = Table B: HLA-DPA1*01:02-B1*04:01L HLA-DRB1*04:08L
  source 1..12: note = Severe acute respiratory syndrome coronavirus 2
FCNDPFLGVYYH

SEQ ID NO: 25742 - protein, 10 aa, Severe acute respiratory syndrome-related coronavirus
  REGION 1..10: note = Table B: HLA-DPA1*01:02-B1*04:01L
  source 1..10: note = Severe acute respiratory syndrome coronavirus 2
PFLGVYYHKN

SEQ ID NO: 25743 - protein, 10 aa, Severe acute respiratory syndrome-related coronavirus
  REGION 1..10: note = Table B: HLA-DPA1*01:02-B1*04:01L
  source 1..10: note = Severe acute respiratory syndrome coronavirus 2
FLGVYYHKNN

SEQ ID NO: 25744 - protein, 12 aa, Severe acute respiratory syndrome-related coronavirus
  REGION 1..12: note = Table B: HLA-DPA1*01:02-B1*04:01L
  source 1..12: note = Severe acute respiratory syndrome coronavirus 2
KNLREFVFKNID

SEQ ID NO: 25745 - protein, 10 aa, Severe acute respiratory syndrome-related coronavirus
  REGION 1..10: note = Table B: HLA-DPA1*01:02-B1*04:01L
  source 1..10: note = Severe acute respiratory syndrome coronavirus 2
YQTSNFRVQP

SEQ ID NO: 25746 - protein, 11 aa, Severe acute respiratory syndrome-related coronavirus
  REGION 1..11: note = Table B: HLA-DPA1*01:02-B1*04:01L
  source 1..11: note = Severe acute respiratory syndrome coronavirus 2
YNYLYRLFRKS

SEQ ID NO: 25747 - protein, 10 aa, Severe acute respiratory syndrome-related coronavirus
  REGION 1..10: note = Table B: HLA-DPA1*01:02-B1*04:01L HLA-DRB1*16:01L HLA-DRB1*04:08L
  source 1..10: note = Severe acute respiratory syndrome coronavirus 2
YLYRLFRKSN

SEQ ID NO: 25748 - protein, 17 aa, Severe acute respiratory syndrome-related coronavirus
  REGION 1..17: note = Table B: HLA-DPA1*01:02-B1*04:01L
  source 1..17: note = Severe acute respiratory syndrome coronavirus 2
ISTEIYQAGSTPCNGVE

SEQ ID NO: 25749 - protein, 10 aa, Severe acute respiratory syndrome-related coronavirus
  REGION 1..10: note = Table B: HLA-DPA1*01:02-B1*04:01L
  source 1..10: note = Severe acute respiratory syndrome coronavirus 2
VVVLSFELLH

SEQ ID NO: 25750 - protein, 10 aa, Severe acute respiratory syndrome-related coronavirus
  REGION 1..10: note = Table B: HLA-DPA1*01:02-B1*04:01L
  source 1..10: note = Severe acute respiratory syndrome coronavirus 2
ICAQKFNGLT

SEQ ID NO: 25751 - protein, 10 aa, Severe acute respiratory syndrome-related coronavirus
  REGION 1..10: note = Table B: HLA-DPA1*01:02-B1*04:01L
  source 1..10: note = Severe acute respiratory syndrome coronavirus 2
PHGVVFLHVT

SEQ ID NO: 25752 - protein, 10 aa, Severe acute respiratory syndrome-related coronavirus
  REGION 1..10: note = Table B: HLA-DPA1*01:02-B1*04:01L
  source 1..10: note = Severe acute respiratory syndrome coronavirus 2
FLHVTYVPAQ

SEQ ID NO: 25753 - protein, 11 aa, Severe acute respiratory syndrome-related coronavirus
  REGION 1..11: note = Table B: HLA-DPA1*01:02-B1*04:01L
  source 1..11: note = Severe acute respiratory syndrome coronavirus 2
NGTHWFVTQRN

SEQ ID NO: 25754 - protein, 11 aa, Severe acute respiratory syndrome-related coronavirus
  REGION 1..11: note = Table B: HLA-DPA1*01:02-B1*04:01L
  source 1..11: note = Severe acute respiratory syndrome coronavirus 2
GTHWFVTQRNF

SEQ ID NO: 25755 - protein, 10 aa, Severe acute respiratory syndrome-related coronavirus
  REGION 1..10: note = Table B: HLA-DPA1*01:02-B1*04:01L
  source 1..10: note = Severe acute respiratory syndrome coronavirus 2
YTEKWESGVK

SEQ ID NO: 25756 - protein, 11 aa, Severe acute respiratory syndrome-related coronavirus
  REGION 1..11: note = Table B: HLA-DPA1*01:02-B1*04:01L
  source 1..11: note = Severe acute respiratory syndrome coronavirus 2
YFTSDYYQLYS

SEQ ID NO: 25757 - protein, 13 aa, Severe acute respiratory syndrome-related coronavirus
  REGION 1..13: note = Table B: HLA-DPA1*01:02-B1*04:01L
  source 1..13: note = Severe acute respiratory syndrome coronavirus 2
TGVEHVTFFIYNK

SEQ ID NO: 25758 - protein, 12 aa, Severe acute respiratory syndrome-related coronavirus
  REGION 1..12: note = Table B: HLA-DPA1*01:02-B1*04:01L
  source 1..12: note = Severe acute respiratory syndrome coronavirus 2
VKPSFYVYSRVK

SEQ ID NO: 25759 - protein, 10 aa, Severe acute respiratory syndrome-related coronavirus
  REGION 1..10: note = Table B: HLA-DPA1*01:02-B1*04:01L HLA-DQA1*01:03-B1*06:01L
  source 1..10: note = Severe acute respiratory syndrome coronavirus 2
FYVYSRVKNL

SEQ ID NO: 25760 - protein, 11 aa, Severe acute respiratory syndrome-related coronavirus
  REGION 1..11: note = Table B: HLA-DPA1*01:02-B1*04:01L
  source 1..11: note = Severe acute respiratory syndrome coronavirus 2
ITVEELKKLLE

SEQ ID NO: 25761 - protein, 10 aa, Severe acute respiratory syndrome-related coronavirus
  REGION 1..10: note = Table B: HLA-DPA1*01:02-B1*04:01L
  source 1..10: note = Severe acute respiratory syndrome coronavirus 2
NRNRFLYIIK

SEQ ID NO: 25762 - protein, 11 aa, Severe acute respiratory syndrome-related coronavirus
  REGION 1..11: note = Table B: HLA-DPA1*01:02-B1*04:01L
  source 1..11: note = Severe acute respiratory syndrome coronavirus 2
FIASFRLFART

SEQ ID NO: 25763 - protein, 12 aa, Severe acute respiratory syndrome-related coronavirus
  REGION 1..12: note = Table B: HLA-DPA1*01:02-B1*04:01L
  source 1..12: note = Severe acute respiratory syndrome coronavirus 2
AEILLIIMRTFK

SEQ ID NO: 25764 - protein, 15 aa, Severe acute respiratory syndrome-related coronavirus
  REGION 1..15: note = Table B: HLA-DPA1*01:02-B1*04:01L HLA-DRB1*16:01L HLA-DRB1*04:08L
  source 1..15: note = Severe acute respiratory syndrome coronavirus 2
LPNNTASWFTALTQH

SEQ ID NO: 25765 - protein, 12 aa, Severe acute respiratory syndrome-related coronavirus
  REGION 1..12: note = Table B: HLA-DPA1*01:02-B1*04:01L
  source 1..12: note = Severe acute respiratory syndrome coronavirus 2
TNSSPDDQIGYY

SEQ ID NO: 25766 - protein, 10 aa, Severe acute respiratory syndrome-related coronavirus
  REGION 1..10: note = Table B: HLA-DPA1*01:02-B1*04:01L
  source 1..10: note = Severe acute respiratory syndrome coronavirus 2
LALLLLDRLN

SEQ ID NO: 25767 - protein, 11 aa, Severe acute respiratory syndrome-related coronavirus
  REGION 1..11: note = Table B: HLA-DPA1*01:02-B1*04:01L
  source 1..11: note = Severe acute respiratory syndrome coronavirus 2
ASAFFGMSRIG

SEQ ID NO: 25768 - protein, 11 aa, Severe acute respiratory syndrome-related coronavirus
  REGION 1..11: note = Table B: HLA-DPA1*01:02-B1*04:01L
  source 1..11: note = Severe acute respiratory syndrome coronavirus 2
FKDQVILLNKH

SEQ ID NO: 25769 - protein, 16 aa, Severe acute respiratory syndrome-related coronavirus
  REGION 1..16: note = Table B: HLA-DRB1*07:01L
  source 1..16: note = Severe acute respiratory syndrome coronavirus 2
DSVEEVLSEARQHLKD

SEQ ID NO: 25770 - protein, 14 aa, Severe acute respiratory syndrome-related coronavirus
  REGION 1..14: note = Table B: HLA-DRB1*07:01L
  source 1..14: note = Severe acute respiratory syndrome coronavirus 2
LVPHVGEIPVAYRK

SEQ ID NO: 25771 - protein, 17 aa, Severe acute respiratory syndrome-related coronavirus
  REGION 1..17: note = Table B: HLA-DRB1*07:01L
  source 1..17: note = Severe acute respiratory syndrome coronavirus 2
IGEQKSILSPLYAFASE

SEQ ID NO: 25772 - protein, 16 aa, Severe acute respiratory syndrome-related coronavirus
  REGION 1..16: note = Table B: HLA-DRB1*07:01L
  source 1..16: note = Severe acute respiratory syndrome coronavirus 2
DGSEDNQTTTIQTIVE

SEQ ID NO: 25773 - protein, 14 aa, Severe acute respiratory syndrome-related coronavirus
  REGION 1..14: note = Table B: HLA-DRB1*07:01L
  source 1..14: note = Severe acute respiratory syndrome coronavirus 2
EVNSFSGYLKLTDN

SEQ ID NO: 25774 - protein, 14 aa, Severe acute respiratory syndrome-related coronavirus
  REGION 1..14: note = Table B: HLA-DRB1*07:01L
  source 1..14: note = Severe acute respiratory syndrome coronavirus 2
EGKTFYVLPNDDTL

SEQ ID NO: 25775 - protein, 15 aa, Severe acute respiratory syndrome-related coronavirus
  REGION 1..15: note = Table B: HLA-DRB1*07:01L
  source 1..15: note = Severe acute respiratory syndrome coronavirus 2
LGDVRETMSYLFQHA

SEQ ID NO: 25776 - protein, 16 aa, Severe acute respiratory syndrome-related coronavirus
  REGION 1..16: note = Table B: HLA-DRB1*07:01L HLA-DRB1*10:01L
  source 1..16: note = Severe acute respiratory syndrome coronavirus 2
FDNFKFVCDNIKFADD

SEQ ID NO: 25777 - protein, 16 aa, Severe acute respiratory syndrome-related coronavirus
  REGION 1..16: note = Table B: HLA-DRB1*07:01L
  source 1..16: note = Severe acute respiratory syndrome coronavirus 2
SIHLYFDKAGQKTYER

SEQ ID NO: 25778 - protein, 15 aa, Severe acute respiratory syndrome-related coronavirus
  REGION 1..15: note = Table B: HLA-DRB1*07:01L
  source 1..15: note = Severe acute respiratory syndrome coronavirus 2
TNDKACPLIAAVITR

SEQ ID NO: 25779 - protein, 16 aa, Severe acute respiratory syndrome-related coronavirus
  REGION 1..16: note = Table B: HLA-DRB1*07:01L
  source 1..16: note = Severe acute respiratory syndrome coronavirus 2
LKRRVVFNGVSFSTFE

SEQ ID NO: 25780 - protein, 12 aa, Severe acute respiratory syndrome-related coronavirus
  REGION 1..12: note = Table B: HLA-DRB1*07:01L
  source 1..12: note = Severe acute respiratory syndrome coronavirus 2
DYLVSTQEFRYM

SEQ ID NO: 25781 - protein, 17 aa, Severe acute respiratory syndrome-related coronavirus
  REGION 1..17: note = Table B: HLA-DRB1*07:01L
  source 1..17: note = Severe acute respiratory syndrome coronavirus 2
ISRQRLTKYTMADLVYA

SEQ ID NO: 25782 - protein, 12 aa, Severe acute respiratory syndrome-related coronavirus
  REGION 1..12: note = Table B: HLA-DRB1*07:01L
  source 1..12: note = Severe acute respiratory syndrome coronavirus 2
LRVYANLGERVR

SEQ ID NO: 25783 - protein, 14 aa, Severe acute respiratory syndrome-related coronavirus
  REGION 1..14: note = Table B: HLA-DRB1*07:01L
  source 1..14: note = Severe acute respiratory syndrome coronavirus 2
RFYRLANECAQVLS

SEQ ID NO: 25784 - protein, 16 aa, Severe acute respiratory syndrome-related coronavirus
  REGION 1..16: note = Table B: HLA-DRB1*07:01L
  source 1..16: note = Severe acute respiratory syndrome coronavirus 2
NGQVFGLYKNTCVGSD

SEQ ID NO: 25785 - protein, 14 aa, Severe acute respiratory syndrome-related coronavirus
  REGION 1..14: note = Table B: HLA-DRB1*07:01L
  source 1..14: note = Severe acute respiratory syndrome coronavirus 2
NRNYVFTGYRVTKN

SEQ ID NO: 25786 - protein, 14 aa, Severe acute respiratory syndrome-related coronavirus
  REGION 1..14: note = Table B: HLA-DRB1*07:01L
  source 1..14: note = Severe acute respiratory syndrome coronavirus 2
YGDAVVYRGTTTYK

SEQ ID NO: 25787 - protein, 11 aa, Severe acute respiratory syndrome-related coronavirus
  REGION 1..11: note = Table B: HLA-DRB1*07:01L
  source 1..11: note = Severe acute respiratory syndrome coronavirus 2
TTYKLNVGDYF

SEQ ID NO: 25788 - protein, 14 aa, Severe acute respiratory syndrome-related coronavirus
  REGION 1..14: note = Table B: HLA-DRB1*07:01L
  source 1..14: note = Severe acute respiratory syndrome coronavirus 2
VREFLTRNPAWRKA

SEQ ID NO: 25789 - protein, 14 aa, Severe acute respiratory syndrome-related coronavirus
  REGION 1..14: note = Table B: HLA-DRB1*07:01L HLA-DRB1*04:08L
  source 1..14: note = Severe acute respiratory syndrome coronavirus 2
TREAVGTNLPLQLG

SEQ ID NO: 25790 - protein, 14 aa, Severe acute respiratory syndrome-related coronavirus
  REGION 1..14: note = Table B: HLA-DRB1*07:01L
  source 1..14: note = Severe acute respiratory syndrome coronavirus 2
FDYVYNPFMIDVQQ

SEQ ID NO: 25791 - protein, 14 aa, Severe acute respiratory syndrome-related coronavirus
  REGION 1..14: note = Table B: HLA-DRB1*07:01L HLA-DRB1*10:01L
  source 1..14: note = Severe acute respiratory syndrome coronavirus 2
LWVYKQFDTYNLWN

SEQ ID NO: 25792 - protein, 16 aa, Severe acute respiratory syndrome-related coronavirus
  REGION 1..16: note = Table B: HLA-DRB1*07:01L
  source 1..16: note = Severe acute respiratory syndrome coronavirus 2
DEFIERYKLEGYAFEH

SEQ ID NO: 25793 - protein, 16 aa, Severe acute respiratory syndrome-related coronavirus
  REGION 1..16: note = Table B: HLA-DRB1*07:01L
  source 1..16: note = Severe acute respiratory syndrome coronavirus 2
VPYNMRVIHFGAGSDK

SEQ ID NO: 25794 - protein, 12 aa, Severe acute respiratory syndrome-related coronavirus
  REGION 1..12: note = Table B: HLA-DRB1*07:01L
  source 1..12: note = Severe acute respiratory syndrome coronavirus 2
LALGGSVAIKIT

SEQ ID NO: 25795 - protein, 14 aa, Severe acute respiratory syndrome-related coronavirus
  REGION 1..14: note = Table B: HLA-DRB1*07:01L
  source 1..14: note = Severe acute respiratory syndrome coronavirus 2
SKGRLIIRENNRVV

SEQ ID NO: 25796 - protein, 17 aa, Severe acute respiratory syndrome-related coronavirus
  REGION 1..17: note = Table B: HLA-DRB1*07:01L
  source 1..17: note = Severe acute respiratory syndrome coronavirus 2
PPAYTNSFTRGVYYPDK

SEQ ID NO: 25797 - protein, 16 aa, Severe acute respiratory syndrome-related coronavirus
  REGION 1..16: note = Table B: HLA-DRB1*07:01L
  source 1..16: note = Severe acute respiratory syndrome coronavirus 2
LDSKTQSLLIVNNATN

SEQ ID NO: 25798 - protein, 14 aa, Severe acute respiratory syndrome-related coronavirus
  REGION 1..14: note = Table B: HLA-DRB1*07:01L
  source 1..14: note = Severe acute respiratory syndrome coronavirus 2
NDPFLGVYYHKNNK

SEQ ID NO: 25799 - protein, 14 aa, Severe acute respiratory syndrome-related coronavirus
  REGION 1..14: note = Table B: HLA-DRB1*07:01L
  source 1..14: note = Severe acute respiratory syndrome coronavirus 2
ALHRSYLTPGDSSS

SEQ ID NO: 25800 - protein, 15 aa, Severe acute respiratory syndrome-related coronavirus
  REGION 1..15: note = Table B: HLA-DRB1*07:01L
  source 1..15: note = Severe acute respiratory syndrome coronavirus 2
NRKRISNCVADYSVL

SEQ ID NO: 25801 - protein, 14 aa, Severe acute respiratory syndrome-related coronavirus
  REGION 1..14: note = Table B: HLA-DRB1*07:01L
  source 1..14: note = Severe acute respiratory syndrome coronavirus 2
QIAPGQTGKIADYN

SEQ ID NO: 25802 - protein, 15 aa, Severe acute respiratory syndrome-related coronavirus
  REGION 1..15: note = Table B: HLA-DRB1*07:01L
  source 1..15: note = Severe acute respiratory syndrome coronavirus 2
DEMIAQYTSALLAGT

SEQ ID NO: 25803 - protein, 14 aa, Severe acute respiratory syndrome-related coronavirus
  REGION 1..14: note = Table B: HLA-DRB1*07:01L
  source 1..14: note = Severe acute respiratory syndrome coronavirus 2
EIDRLNEVAKNLNE

SEQ ID NO: 25804 - protein, 17 aa, Severe acute respiratory syndrome-related coronavirus
  REGION 1..17: note = Table B: HLA-DRB1*07:01L
  source 1..17: note = Severe acute respiratory syndrome coronavirus 2
VTSSIVITSGDGTTSPI

SEQ ID NO: 25805 - protein, 15 aa, Severe acute respiratory syndrome-related coronavirus
  REGION 1..15: note = Table B: HLA-DRB1*07:01L
  source 1..15: note = Severe acute respiratory syndrome coronavirus 2
NLDYIINLIIKNLSK

SEQ ID NO: 25806 - protein, 15 aa, Severe acute respiratory syndrome-related coronavirus
  REGION 1..15: note = Table B: HLA-DRB1*07:01L
  source 1..15: note = Severe acute respiratory syndrome coronavirus 2
IGTRNPANNAAIVLQ

SEQ ID NO: 25807 - protein, 14 aa, Severe acute respiratory syndrome-related coronavirus
  REGION 1..14: note = Table B: HLA-DRB1*07:01L
  source 1..14: note = Severe acute respiratory syndrome coronavirus 2
TATKAYNVTQAFGR

SEQ ID NO: 25808 - protein, 17 aa, Severe acute respiratory syndrome-related coronavirus
  REGION 1..17: note = Table B: HLA-DRB1*07:01L
  source 1..17: note = Severe acute respiratory syndrome coronavirus 2
DKKKKADETQALPQRQK

SEQ ID NO: 25809 - protein, 12 aa, Severe acute respiratory syndrome-related coronavirus
  REGION 1..12: note = Table B: HLA-DRB1*10:01L HLA-DRB1*15:03L
  source 1..12: note = Severe acute respiratory syndrome coronavirus 2
GYKAIDGGVTRD

SEQ ID NO: 25810 - protein, 15 aa, Severe acute respiratory syndrome-related coronavirus
  REGION 1..15: note = Table B: HLA-DRB1*10:01L
  source 1..15: note = Severe acute respiratory syndrome coronavirus 2
LPRVFSAVGNICYTP

SEQ ID NO: 25811 - protein, 14 aa, Severe acute respiratory syndrome-related coronavirus
  REGION 1..14: note = Table B: HLA-DRB1*10:01L HLA-DRB1*15:01L
  source 1..14: note = Severe acute respiratory syndrome coronavirus 2
MSAFAMMFVKHKHA

SEQ ID NO: 25812 - protein, 12 aa, Severe acute respiratory syndrome-related coronavirus
  REGION 1..12: note = Table B: HLA-DRB1*10:01L
  source 1..12: note = Severe acute respiratory syndrome coronavirus 2
DGTLMIERFVSL

SEQ ID NO: 25813 - protein, 15 aa, Severe acute respiratory syndrome-related coronavirus
  REGION 1..15: note = Table B: HLA-DRB1*10:01L
  source 1..15: note = Severe acute respiratory syndrome coronavirus 2
KGDYGDAVVYRGTTT

SEQ ID NO: 25814 - protein, 16 aa, Severe acute respiratory syndrome-related coronavirus
  REGION 1..16: note = Table B: HLA-DRB1*10:01L
  source 1..16: note = Severe acute respiratory syndrome coronavirus 2
KAALLADKFPVLHDIG

SEQ ID NO: 25815 - protein, 14 aa, Severe acute respiratory syndrome-related coronavirus
  REGION 1..14: note = Table B: HLA-DRB1*10:01L
  source 1..14: note = Severe acute respiratory syndrome coronavirus 2
FAWWTAFVTNVNAS

SEQ ID NO: 25816 - protein, 17 aa, Severe acute respiratory syndrome-related coronavirus
  REGION 1..17: note = Table B: HLA-DRB1*10:01L HLA-DRB1*08:02L
  source 1..17: note = Severe acute respiratory syndrome coronavirus 2
SNKKFLPFQQFGRDIAD

SEQ ID NO: 25817 - protein, 13 aa, Severe acute respiratory syndrome-related coronavirus
  REGION 1..13: note = Table B: HLA-DRB1*10:01L HLA-DRB1*08:03L
  source 1..13: note = Severe acute respiratory syndrome coronavirus 2
FLEYHDVRVVLDF

SEQ ID NO: 25818 - protein, 14 aa, Severe acute respiratory syndrome-related coronavirus
  REGION 1..14: note = Table B: HLA-DRB1*10:01L
  source 1..14: note = Severe acute respiratory syndrome coronavirus 2
AIVLQLPQGTTLPK

SEQ ID NO: 25819 - protein, 16 aa, Severe acute respiratory syndrome-related coronavirus
  REGION 1..16: note = Table B: HLA-DRB1*10:01L
  source 1..16: note = Severe acute respiratory syndrome coronavirus 2
DAALALLLLDRLNQLE

SEQ ID NO: 25820 - protein, 11 aa, Severe acute respiratory syndrome-related coronavirus
  REGION 1..11: note = Table B: HLA-DRB1*16:01L HLA-DQA1*02:01-B1*03:03L
  source 1..11: note = Severe acute respiratory syndrome coronavirus 2
EIAWYTERSEK

SEQ ID NO: 25821 - protein, 14 aa, Severe acute respiratory syndrome-related coronavirus
  REGION 1..14: note = Table B: HLA-DRB1*16:01L HLA-DRB1*15:03L
  source 1..14: note = Severe acute respiratory syndrome coronavirus 2
IKTIQPRVEKKKLD

SEQ ID NO: 25822 - protein, 11 aa, Severe acute respiratory syndrome-related coronavirus
  REGION 1..11: note = Table B: HLA-DRB1*16:01L
  source 1..11: note = Severe acute respiratory syndrome coronavirus 2
KKLDGFMGRIR

SEQ ID NO: 25823 - protein, 12 aa, Severe acute respiratory syndrome-related coronavirus
  REGION 1..12: note = Table B: HLA-DRB1*16:01L HLA-DRB1*15:03L
  source 1..12: note = Severe acute respiratory syndrome coronavirus 2
SLAEYHNESGLK

SEQ ID NO: 25824 - protein, 13 aa, Severe acute respiratory syndrome-related coronavirus
  REGION 1..13: note = Table B: HLA-DRB1*16:01L HLA-DQA1*01:03-B1*06:01L
  source 1..13: note = Severe acute respiratory syndrome coronavirus 2
VGEGSEGLNDNLL

SEQ ID NO: 25825 - protein, 14 aa, Severe acute respiratory syndrome-related coronavirus
  REGION 1..14: note = Table B: HLA-DRB1*16:01L HLA-DRB1*04:08L HLA-DRB1*15:03L
  source 1..14: note = Severe acute respiratory syndrome coronavirus 2
IVESCGNFKVTKGK

SEQ ID NO: 25826 - protein, 15 aa, Severe acute respiratory syndrome-related coronavirus
  REGION 1..15: note = Table B: HLA-DRB1*16:01L
  source 1..15: note = Severe acute respiratory syndrome coronavirus 2
DEEEGDCEEEEFEPS

SEQ ID NO: 25827 - protein, 14 aa, Severe acute respiratory syndrome-related coronavirus
  REGION 1..14: note = Table B: HLA-DRB1*16:01L
  source 1..14: note = Severe acute respiratory syndrome coronavirus 2
EPSTQYEYGTEDDY

SEQ ID NO: 25828 - protein, 12 aa, Severe acute respiratory syndrome-related coronavirus
  REGION 1..12: note = Table B: HLA-DRB1*16:01L
  source 1..12: note = Severe acute respiratory syndrome coronavirus 2
TSAALQPEEEQE

SEQ ID NO: 25829 - protein, 12 aa, Severe acute respiratory syndrome-related coronavirus
  REGION 1..12: note = Table B: HLA-DRB1*16:01L
  source 1..12: note = Severe acute respiratory syndrome coronavirus 2
LQPEEEQEEDWL

SEQ ID NO: 25830 - protein, 14 aa, Severe acute respiratory syndrome-related coronavirus
  REGION 1..14: note = Table B: HLA-DRB1*16:01L
  source 1..14: note = Severe acute respiratory syndrome coronavirus 2
QPEEEQEEDWLDDD

SEQ ID NO: 25831 - protein, 14 aa, Severe acute respiratory syndrome-related coronavirus
  REGION 1..14: note = Table B: HLA-DRB1*16:01L
  source 1..14: note = Severe acute respiratory syndrome coronavirus 2
EQEEDWLDDDSQQT

SEQ ID NO: 25832 - protein, 13 aa, Severe acute respiratory syndrome-related coronavirus
  REGION 1..13: note = Table B: HLA-DRB1*16:01L
  source 1..13: note = Severe acute respiratory syndrome coronavirus 2
TRKLMPVCVETKA

SEQ ID NO: 25833 - protein, 12 aa, Severe acute respiratory syndrome-related coronavirus
  REGION 1..12: note = Table B: HLA-DRB1*16:01L HLA-DQA1*01:03-B1*06:01L HLA-DQA1*02:01-B1*03:03L
  source 1..12: note = Severe acute respiratory syndrome coronavirus 2
YNGYLTSSSKTP

SEQ ID NO: 25834 - protein, 12 aa, Severe acute respiratory syndrome-related coronavirus
  REGION 1..12: note = Table B: HLA-DRB1*16:01L
  source 1..12: note = Severe acute respiratory syndrome coronavirus 2
TPEEHFIETISL

SEQ ID NO: 25835 - protein, 10 aa, Severe acute respiratory syndrome-related coronavirus
  REGION 1..10: note = Table B: HLA-DRB1*16:01L HLA-DQA1*02:01-B1*03:03L
  source 1..10: note = Severe acute respiratory syndrome coronavirus 2
SLREVRTIKV

SEQ ID NO: 25836 - protein, 14 aa, Severe acute respiratory syndrome-related coronavirus
  REGION 1..14: note = Table B: HLA-DRB1*16:01L HLA-DRB1*04:08L HLA-DRB1*15:03L
  source 1..14: note = Severe acute respiratory syndrome coronavirus 2
PSFLGRYMSALNHT

SEQ ID NO: 25837 - protein, 12 aa, Severe acute respiratory syndrome-related coronavirus
  REGION 1..12: note = Table B: HLA-DRB1*16:01L HLA-DRB1*04:08L
  source 1..12: note = Severe acute respiratory syndrome coronavirus 2
YQCGHYKHITSK

SEQ ID NO: 25838 - protein, 14 aa, Severe acute respiratory syndrome-related coronavirus
  REGION 1..14: note = Table B: HLA-DRB1*16:01L
  source 1..14: note = Severe acute respiratory syndrome coronavirus 2
SKETLYCIDGALLT

SEQ ID NO: 25839 - protein, 12 aa, Severe acute respiratory syndrome-related coronavirus
  REGION 1..12: note = Table B: HLA-DRB1*16:01L HLA-DQA1*01:03-B1*06:01L HLA-DQA1*02:01-B1*03:03L
  source 1..12: note = Severe acute respiratory syndrome coronavirus 2
KDNSYFTEQPID

SEQ ID NO: 25840 - protein, 12 aa, Severe acute respiratory syndrome-related coronavirus
  REGION 1..12: note = Table B: HLA-DRB1*16:01L HLA-DRB1*15:03L
  source 1..12: note = Severe acute respiratory syndrome coronavirus 2
LKVTFFPDLNGD

SEQ ID NO: 25841 - protein, 12 aa, Severe acute respiratory syndrome-related coronavirus
  REGION 1..12: note = Table B: HLA-DRB1*16:01L
  source 1..12: note = Severe acute respiratory syndrome coronavirus 2
DLNGDVVAIDYK

SEQ ID NO: 25842 - protein, 15 aa, Severe acute respiratory syndrome-related coronavirus
  REGION 1..15: note = Table B: HLA-DRB1*16:01L
  source 1..15: note = Severe acute respiratory syndrome coronavirus 2
FKKGAKLLHKPIVWH

SEQ ID NO: 25843 - protein, 10 aa, Severe acute respiratory syndrome-related coronavirus
  REGION 1..10: note = Table B: HLA-DRB1*16:01L
  source 1..10: note = Severe acute respiratory syndrome coronavirus 2
KTLATHGLAA

SEQ ID NO: 25844 - protein, 16 aa, Severe acute respiratory syndrome-related coronavirus
  REGION 1..16: note = Table B: HLA-DRB1*16:01L
  source 1..16: note = Severe acute respiratory syndrome coronavirus 2
TLLLQLCTFTRSTNSR

SEQ ID NO: 25845 - protein, 12 aa, Severe acute respiratory syndrome-related coronavirus
  REGION 1..12: note = Table B: HLA-DRB1*16:01L HLA-DRB1*04:08L
  source 1..12: note = Severe acute respiratory syndrome coronavirus 2
YILFTRFFYVLG

SEQ ID NO: 25846 - protein, 12 aa, Severe acute respiratory syndrome-related coronavirus
  REGION 1..12: note = Table B: HLA-DRB1*16:01L HLA-DRB1*15:03L
  source 1..12: note = Severe acute respiratory syndrome coronavirus 2
GSIHLYFDKAGQ

SEQ ID NO: 25847 - protein, 12 aa, Severe acute respiratory syndrome-related coronavirus
  REGION 1..12: note = Table B: HLA-DRB1*16:01L HLA-DRB1*04:08L
  source 1..12: note = Severe acute respiratory syndrome coronavirus 2
LAYYFMRFRRAF

SEQ ID NO: 25848 - protein, 13 aa, Severe acute respiratory syndrome-related coronavirus
  REGION 1..13: note = Table B: HLA-DRB1*16:01L
  source 1..13: note = Severe acute respiratory syndrome coronavirus 2
DVSFLAHIQWMVM

SEQ ID NO: 25849 - protein, 11 aa, Severe acute respiratory syndrome-related coronavirus
  REGION 1..11: note = Table B: HLA-DRB1*16:01L HLA-DRB1*15:03L
  source 1..11: note = Severe acute respiratory syndrome coronavirus 2
HFYWFFSNYLK

SEQ ID NO: 25850 - protein, 11 aa, Severe acute respiratory syndrome-related coronavirus
  REGION 1..11: note = Table B: HLA-DRB1*16:01L HLA-DQA1*01:03-B1*06:01L
  source 1..11: note = Severe acute respiratory syndrome coronavirus 2
LNPNYEDLLIR

SEQ ID NO: 25851 - protein, 10 aa, Severe acute respiratory syndrome-related coronavirus
  REGION 1..10: note = Table B: HLA-DRB1*16:01L HLA-DQA1*01:03-B1*06:01L HLA-DQA1*02:01-B1*03:03L HLA-DRB1*15:03L
  source 1..10: note = Severe acute respiratory syndrome coronavirus 2
VYKVYYGNAL

SEQ ID NO: 25852 - protein, 11 aa, Severe acute respiratory syndrome-related coronavirus
  REGION 1..11: note = Table B: HLA-DRB1*16:01L
  source 1..11: note = Severe acute respiratory syndrome coronavirus 2
LLAKDTTEAFE

SEQ ID NO: 25853 - protein, 13 aa, Severe acute respiratory syndrome-related coronavirus
  REGION 1..13: note = Table B: HLA-DRB1*16:01L
  source 1..13: note = Severe acute respiratory syndrome coronavirus 2
AKDTTEAFEKMVS

SEQ ID NO: 25854 - protein, 13 aa, Severe acute respiratory syndrome-related coronavirus
  REGION 1..13: note = Table B: HLA-DRB1*16:01L
  source 1..13: note = Severe acute respiratory syndrome coronavirus 2
ATAQEAYEQAVAN

SEQ ID NO: 25855 - protein, 11 aa, Severe acute respiratory syndrome-related coronavirus
  REGION 1..11: note = Table B: HLA-DRB1*16:01L
  source 1..11: note = Severe acute respiratory syndrome coronavirus 2
RKLEKMADQAM

SEQ ID NO: 25856 - protein, 12 aa, Severe acute respiratory syndrome-related coronavirus
  REGION 1..12: note = Table B: HLA-DRB1*16:01L
  source 1..12: note = Severe acute respiratory syndrome coronavirus 2
QTMLFTMLRKLD

SEQ ID NO: 25857 - protein, 12 aa, Severe acute respiratory syndrome-related coronavirus
  REGION 1..12: note = Table B: HLA-DRB1*16:01L HLA-DQA1*01:03-B1*06:01L HLA-DRB1*15:03L
  source 1..12: note = Severe acute respiratory syndrome coronavirus 2
NALAYYNTTKGG

SEQ ID NO: 25858 - protein, 11 aa, Severe acute respiratory syndrome-related coronavirus
  REGION 1..11: note = Table B: HLA-DRB1*16:01L HLA-DQA1*01:03-B1*06:01L
  source 1..11: note = Severe acute respiratory syndrome coronavirus 2
NLIDSYFVVKR

SEQ ID NO: 25859 - protein, 13 aa, Severe acute respiratory syndrome-related coronavirus
  REGION 1..13: note = Table B: HLA-DRB1*16:01L
  source 1..13: note = Severe acute respiratory syndrome coronavirus 2
QALLKTVQFCDAM

SEQ ID NO: 25860 - protein, 13 aa, Severe acute respiratory syndrome-related coronavirus
  REGION 1..13: note = Table B: HLA-DRB1*16:01L
  source 1..13: note = Severe acute respiratory syndrome coronavirus 2
NGNWYDFGDFIQT

SEQ ID NO: 25861 - protein, 13 aa, Severe acute respiratory syndrome-related coronavirus
  REGION 1..13: note = Table B: HLA-DRB1*16:01L HLA-DRB1*04:08L HLA-DRB1*15:03L
  source 1..13: note = Severe acute respiratory syndrome coronavirus 2
LKLFDRYFKYWDQ

SEQ ID NO: 25862 - protein, 12 aa, Severe acute respiratory syndrome-related coronavirus
  REGION 1..12: note = Table B: HLA-DRB1*16:01L
  source 1..12: note = Severe acute respiratory syndrome coronavirus 2
HFFFAQDGNAAI

SEQ ID NO: 25863 - protein, 11 aa, Severe acute respiratory syndrome-related coronavirus
  REGION 1..11: note = Table B: HLA-DRB1*16:01L HLA-DQA1*01:03-B1*06:01L
  source 1..11: note = Severe acute respiratory syndrome coronavirus 2
DSMSYEDQDAL

SEQ ID NO: 25864 - protein, 14 aa, Severe acute respiratory syndrome-related coronavirus
  REGION 1..14: note = Table B: HLA-DRB1*16:01L HLA-DRB1*04:08L
  source 1..14: note = Severe acute respiratory syndrome coronavirus 2
RNLQHRLYECLYRN

SEQ ID NO: 25865 - protein, 12 aa, Severe acute respiratory syndrome-related coronavirus
  REGION 1..12: note = Table B: HLA-DRB1*16:01L
  source 1..12: note = Severe acute respiratory syndrome coronavirus 2
LQYIRKLHDELT

SEQ ID NO: 25866 - protein, 14 aa, Severe acute respiratory syndrome-related coronavirus
  REGION 1..14: note = Table B: HLA-DRB1*16:01L
  source 1..14: note = Severe acute respiratory syndrome coronavirus 2
DVTDVTQLYLGGMS

SEQ ID NO: 25867 - protein, 10 aa, Severe acute respiratory syndrome-related coronavirus
  REGION 1..10: note = Table B: HLA-DRB1*16:01L
  source 1..10: note = Severe acute respiratory syndrome coronavirus 2
GYRVTKNSKV

SEQ ID NO: 25868 - protein, 12 aa, Severe acute respiratory syndrome-related coronavirus
  REGION 1..12: note = Table B: HLA-DRB1*16:01L
  source 1..12: note = Severe acute respiratory syndrome coronavirus 2
ARIVYTACSHAA

SEQ ID NO: 25869 - protein, 12 aa, Severe acute respiratory syndrome-related coronavirus
  REGION 1..12: note = Table B: HLA-DRB1*16:01L
  source 1..12: note = Severe acute respiratory syndrome coronavirus 2
VECFDKFKVNST

SEQ ID NO: 25870 - protein, 10 aa, Severe acute respiratory syndrome-related coronavirus
  REGION 1..10: note = Table B: HLA-DRB1*16:01L HLA-DQA1*02:01-B1*03:03L
  source 1..10: note = Severe acute respiratory syndrome coronavirus 2
MFYKGVITHD

SEQ ID NO: 25871 - protein, 11 aa, Severe acute respiratory syndrome-related coronavirus
  REGION 1..11: note = Table B: HLA-DRB1*16:01L
  source 1..11: note = Severe acute respiratory syndrome coronavirus 2
EFLTRNPAWRK

SEQ ID NO: 25872 - protein, 10 aa, Severe acute respiratory syndrome-related coronavirus
  REGION 1..10: note = Table B: HLA-DRB1*16:01L
  source 1..10: note = Severe acute respiratory syndrome coronavirus 2
ITREEAIRHV

SEQ ID NO: 25873 - protein, 10 aa, Severe acute respiratory syndrome-related coronavirus
  REGION 1..10: note = Table B: HLA-DRB1*16:01L HLA-DQA1*01:03-B1*06:01L HLA-DQA1*02:01-B1*03:03L HLA-DRB1*15:03L
  source 1..10: note = Severe acute respiratory syndrome coronavirus 2
WHHSIGFDYV

SEQ ID NO: 25874 - protein, 10 aa, Severe acute respiratory syndrome-related coronavirus
  REGION 1..10: note = Table B: HLA-DRB1*16:01L
  source 1..10: note = Severe acute respiratory syndrome coronavirus 2
THSDKFTDGV

SEQ ID NO: 25875 - protein, 13 aa, Severe acute respiratory syndrome-related coronavirus
  REGION 1..13: note = Table B: HLA-DRB1*16:01L HLA-DRB1*04:08L
  source 1..13: note = Severe acute respiratory syndrome coronavirus 2
PFFYYSDSPCESH

SEQ ID NO: 25876 - protein, 10 aa, Severe acute respiratory syndrome-related coronavirus
  REGION 1..10: note = Table B: HLA-DRB1*16:01L
  source 1..10: note = Severe acute respiratory syndrome coronavirus 2
DYKRDAPAHI

SEQ ID NO: 25877 - protein, 15 aa, Severe acute respiratory syndrome-related coronavirus
  REGION 1..15: note = Table B: HLA-DRB1*16:01L HLA-DRB1*04:08L
  source 1..15: note = Severe acute respiratory syndrome coronavirus 2
DGRVDGQVDLFRNAR

SEQ ID NO: 25878 - protein, 11 aa, Severe acute respiratory syndrome-related coronavirus
  REGION 1..11: note = Table B: HLA-DRB1*16:01L
  source 1..11: note = Severe acute respiratory syndrome coronavirus 2
RYKLEGYAFEH

SEQ ID NO: 25879 - protein, 13 aa, Severe acute respiratory syndrome-related coronavirus
  REGION 1..13: note = Table B: HLA-DRB1*16:01L
  source 1..13: note = Severe acute respiratory syndrome coronavirus 2
GLHLLIGLAKRFK

SEQ ID NO: 25880 - protein, 11 aa, Severe acute respiratory syndrome-related coronavirus
  REGION 1..11: note = Table B: HLA-DRB1*16:01L
  source 1..11: note = Severe acute respiratory syndrome coronavirus 2
KRFKESPFELE

SEQ ID NO: 25881 - protein, 11 aa, Severe acute respiratory syndrome-related coronavirus
  REGION 1..11: note = Table B: HLA-DRB1*16:01L
  source 1..11: note = Severe acute respiratory syndrome coronavirus 2
VIHFGAGSDKG

SEQ ID NO: 25882 - protein, 11 aa, Severe acute respiratory syndrome-related coronavirus
  REGION 1..11: note = Table B: HLA-DRB1*16:01L
  source 1..11: note = Severe acute respiratory syndrome coronavirus 2
KLRGTAVMSLK

SEQ ID NO: 25883 - protein, 12 aa, Severe acute respiratory syndrome-related coronavirus
  REGION 1..12: note = Table B: HLA-DRB1*16:01L
  source 1..12: note = Severe acute respiratory syndrome coronavirus 2
NFKNLREFVFKN

SEQ ID NO: 25884 - protein, 10 aa, Severe acute respiratory syndrome-related coronavirus
  REGION 1..10: note = Table B: HLA-DRB1*16:01L HLA-DRB1*15:03L
  source 1..10: note = Severe acute respiratory syndrome coronavirus 2
IYQTSNFRVQ

SEQ ID NO: 25885 - protein, 11 aa, Severe acute respiratory syndrome-related coronavirus
  REGION 1..11: note = Table B: HLA-DRB1*16:01L
  source 1..11: note = Severe acute respiratory syndrome coronavirus 2
SNFRVQPTESI

SEQ ID NO: 25886 - protein, 11 aa, Severe acute respiratory syndrome-related coronavirus
  REGION 1..11: note = Table B: HLA-DRB1*16:01L HLA-DQA1*02:01-B1*03:03L HLA-DRB1*15:03L
  source 1..11: note = Severe acute respiratory syndrome coronavirus 2
KFLPFQQFGRD

SEQ ID NO: 25887 - protein, 10 aa, Severe acute respiratory syndrome-related coronavirus
  REGION 1..10: note = Table B: HLA-DRB1*16:01L
  source 1..10: note = Severe acute respiratory syndrome coronavirus 2
RARSVASQSI

SEQ ID NO: 25888 - protein, 12 aa, Severe acute respiratory syndrome-related coronavirus
  REGION 1..12: note = Table B: HLA-DRB1*16:01L HLA-DRB1*15:03L
  source 1..12: note = Severe acute respiratory syndrome coronavirus 2
QVKQIYKTPPIK

SEQ ID NO: 25889 - protein, 12 aa, Severe acute respiratory syndrome-related coronavirus
  REGION 1..12: note = Table B: HLA-DRB1*16:01L
  source 1..12: note = Severe acute respiratory syndrome coronavirus 2
EMIAQYTSALLA

SEQ ID NO: 25890 - protein, 16 aa, Severe acute respiratory syndrome-related coronavirus
  REGION 1..16: note = Table B: HLA-DRB1*16:01L
  source 1..16: note = Severe acute respiratory syndrome coronavirus 2
ATKMSECVLGQSKRVD

SEQ ID NO: 25891 - protein, 12 aa, Severe acute respiratory syndrome-related coronavirus
  REGION 1..12: note = Table B: HLA-DRB1*16:01L HLA-DRB1*04:08L
  source 1..12: note = Severe acute respiratory syndrome coronavirus 2
FLHVTYVPAQEK

SEQ ID NO: 25892 - protein, 10 aa, Severe acute respiratory syndrome-related coronavirus
  REGION 1..10: note = Table B: HLA-DRB1*16:01L HLA-DQA1*02:01-B1*03:03L
  source 1..10: note = Severe acute respiratory syndrome coronavirus 2
AVFQSASKII

SEQ ID NO: 25893 - protein, 14 aa, Severe acute respiratory syndrome-related coronavirus
  REGION 1..14: note = Table B: HLA-DRB1*16:01L HLA-DRB1*04:08L HLA-DRB1*15:03L
  source 1..14: note = Severe acute respiratory syndrome coronavirus 2
ITLKKRWQLALSKG

SEQ ID NO: 25894 - protein, 11 aa, Severe acute respiratory syndrome-related coronavirus
  REGION 1..11: note = Table B: HLA-DRB1*16:01L
  source 1..11: note = Severe acute respiratory syndrome coronavirus 2
VLHSYFTSDYY

SEQ ID NO: 25895 - protein, 11 aa, Severe acute respiratory syndrome-related coronavirus
  REGION 1..11: note = Table B: HLA-DRB1*16:01L HLA-DRB1*04:08L
  source 1..11: note = Severe acute respiratory syndrome coronavirus 2
DGSSGVVNPVM

SEQ ID NO: 25896 - protein, 15 aa, Severe acute respiratory syndrome-related coronavirus
  REGION 1..15: note = Table B: HLA-DRB1*16:01L HLA-DRB1*04:08L
  source 1..15: note = Severe acute respiratory syndrome coronavirus 2
GHHLGRCDIKDLPKE

SEQ ID NO: 25897 - protein, 10 aa, Severe acute respiratory syndrome-related coronavirus
  REGION 1..10: note = Table B: HLA-DRB1*16:01L HLA-DQA1*01:03-B1*06:01L HLA-DQA1*02:01-B1*03:03L
  source 1..10: note = Severe acute respiratory syndrome coronavirus 2
YYKLGASQRV

SEQ ID NO: 25898 - protein, 15 aa, Severe acute respiratory syndrome-related coronavirus
  REGION 1..15: note = Table B: HLA-DRB1*16:01L
  source 1..15: note = Severe acute respiratory syndrome coronavirus 2
NKFALTCFSTQFAFA

SEQ ID NO: 25899 - protein, 11 aa, Severe acute respiratory syndrome-related coronavirus
  REGION 1..11: note = Table B: HLA-DRB1*16:01L
  source 1..11: note = Severe acute respiratory syndrome coronavirus 2
PIHFYSKWYIR

SEQ ID NO: 25900 - protein, 15 aa, Severe acute respiratory syndrome-related coronavirus
  REGION 1..15: note = Table B: HLA-DRB1*16:01L
  source 1..15: note = Severe acute respiratory syndrome coronavirus 2
KEDLKFPRGQGVPIN

SEQ ID NO: 25901 - protein, 11 aa, Severe acute respiratory syndrome-related coronavirus
  REGION 1..11: note = Table B: HLA-DRB1*16:01L HLA-DQA1*02:01-B1*03:03L
  source 1..11: note = Severe acute respiratory syndrome coronavirus 2
FPRGQGVPINT

SEQ ID NO: 25902 - protein, 15 aa, Severe acute respiratory syndrome-related coronavirus
  REGION 1..15: note = Table B: HLA-DRB1*16:01L
  source 1..15: note = Severe acute respiratory syndrome coronavirus 2
RIRGGDGKMKDLSPR

SEQ ID NO: 25903 - protein, 15 aa, Severe acute respiratory syndrome-related coronavirus
  REGION 1..15: note = Table B: HLA-DRB1*16:01L
  source 1..15: note = Severe acute respiratory syndrome coronavirus 2
AEGSRGGSQASSRSS

SEQ ID NO: 25904 - protein, 12 aa, Severe acute respiratory syndrome-related coronavirus
  REGION 1..12: note = Table B: HLA-DRB1*16:01L HLA-DRB1*15:03L
  source 1..12: note = Severe acute respiratory syndrome coronavirus 2
KHIDAYKTFPPT

SEQ ID NO: 25905 - protein, 11 aa, Severe acute respiratory syndrome-related coronavirus
  REGION 1..11: note = Table B: HLA-DQA1*01:03-B1*06:01L
  source 1..11: note = Severe acute respiratory syndrome coronavirus 2
VQLSLPVLQVR

SEQ ID NO: 25906 - protein, 10 aa, Severe acute respiratory syndrome-related coronavirus
  REGION 1..10: note = Table B: HLA-DQA1*01:03-B1*06:01L
  source 1..10: note = Severe acute respiratory syndrome coronavirus 2
GTCGLVEVEK

SEQ ID NO: 25907 - protein, 11 aa, Severe acute respiratory syndrome-related coronavirus
  REGION 1..11: note = Table B: HLA-DQA1*01:03-B1*06:01L
  source 1..11: note = Severe acute respiratory syndrome coronavirus 2
EVEKGVLPQLE

SEQ ID NO: 25908 - protein, 14 aa, Severe acute respiratory syndrome-related coronavirus
  REGION 1..14: note = Table B: HLA-DQA1*01:03-B1*06:01L
  source 1..14: note = Severe acute respiratory syndrome coronavirus 2
TAPHGHVMVELVAE

SEQ ID NO: 25909 - protein, 11 aa, Severe acute respiratory syndrome-related coronavirus
  REGION 1..11: note = Table B: HLA-DQA1*01:03-B1*06:01L HLA-DQA1*02:01-B1*03:03L
  source 1..11: note = Severe acute respiratory syndrome coronavirus 2
ELEGIQYGRSG

SEQ ID NO: 25910 - protein, 12 aa, Severe acute respiratory syndrome-related coronavirus
  REGION 1..12: note = Table B: HLA-DQA1*01:03-B1*06:01L
  source 1..12: note = Severe acute respiratory syndrome coronavirus 2
RSGETLGVLVPH

SEQ ID NO: 25911 - protein, 10 aa, Severe acute respiratory syndrome-related coronavirus
  REGION 1..10: note = Table B: HLA-DQA1*01:03-B1*06:01L
  source 1..10: note = Severe acute respiratory syndrome coronavirus 2
TLGVLVPHVG

SEQ ID NO: 25912 - protein, 11 aa, Severe acute respiratory syndrome-related coronavirus
  REGION 1..11: note = Table B: HLA-DQA1*01:03-B1*06:01L
  source 1..11: note = Severe acute respiratory syndrome coronavirus 2
PHVGEIPVAYR

SEQ ID NO: 25913 - protein, 15 aa, Severe acute respiratory syndrome-related coronavirus
  REGION 1..15: note = Table B: HLA-DQA1*01:03-B1*06:01L
  source 1..15: note = Severe acute respiratory syndrome coronavirus 2
DLKSFDLGDELGTDP

SEQ ID NO: 25914 - protein, 15 aa, Severe acute respiratory syndrome-related coronavirus
  REGION 1..15: note = Table B: HLA-DQA1*01:03-B1*06:01L
  source 1..15: note = Severe acute respiratory syndrome coronavirus 2
SFDLGDELGTDPYED

SEQ ID NO: 25915 - protein, 10 aa, Severe acute respiratory syndrome-related coronavirus
  REGION 1..10: note = Table B: HLA-DQA1*01:03-B1*06:01L
  source 1..10: note = Severe acute respiratory syndrome coronavirus 2
SSGVTRELMR

SEQ ID NO: 25916 - protein, 15 aa, Severe acute respiratory syndrome-related coronavirus
  REGION 1..15: note = Table B: HLA-DQA1*01:03-B1*06:01L
  source 1..15: note = Severe acute respiratory syndrome coronavirus 2
YPLECIKDLLARAGK

SEQ ID NO: 25917 - protein, 12 aa, Severe acute respiratory syndrome-related coronavirus
  REGION 1..12: note = Table B: HLA-DQA1*01:03-B1*06:01L
  source 1..12: note = Severe acute respiratory syndrome coronavirus 2
QTGDFVKATCEF

SEQ ID NO: 25918 - protein, 11 aa, Severe acute respiratory syndrome-related coronavirus
  REGION 1..11: note = Table B: HLA-DQA1*01:03-B1*06:01L
  source 1..11: note = Severe acute respiratory syndrome coronavirus 2
FCGTENLTKEG

SEQ ID NO: 25919 - protein, 10 aa, Severe acute respiratory syndrome-related coronavirus
  REGION 1..10: note = Table B: HLA-DQA1*01:03-B1*06:01L
  source 1..10: note = Severe acute respiratory syndrome coronavirus 2
ATTCGYLPQN

SEQ ID NO: 25920 - protein, 10 aa, Severe acute respiratory syndrome-related coronavirus
  REGION 1..10: note = Table B: HLA-DQA1*01:03-B1*06:01L HLA-DQA1*02:01-B1*03:03L
  source 1..10: note = Severe acute respiratory syndrome coronavirus 2
NHTGVVGEGS

SEQ ID NO: 25921 - protein, 10 aa, Severe acute respiratory syndrome-related coronavirus
  REGION 1..10: note = Table B: HLA-DQA1*01:03-B1*06:01L HLA-DQA1*02:01-B1*03:03L
  source 1..10: note = Severe acute respiratory syndrome coronavirus 2
HTGVVGEGSE

SEQ ID NO: 25922 - protein, 12 aa, Severe acute respiratory syndrome-related coronavirus
  REGION 1..12: note = Table B: HLA-DQA1*01:03-B1*06:01L HLA-DQA1*02:01-B1*03:03L
  source 1..12: note = Severe acute respiratory syndrome coronavirus 2
TGVVGEGSEGLN

SEQ ID NO: 25923 - protein, 13 aa, Severe acute respiratory syndrome-related coronavirus
  REGION 1..13: note = Table B: HLA-DQA1*01:03-B1*06:01L
  source 1..13: note = Severe acute respiratory syndrome coronavirus 2
LNEEIAIILASFS

SEQ ID NO: 25924 - protein, 12 aa, Severe acute respiratory syndrome-related coronavirus
  REGION 1..12: note = Table B: HLA-DQA1*01:03-B1*06:01L
  source 1..12: note = Severe acute respiratory syndrome coronavirus 2
FSASTSAFVETV

SEQ ID NO: 25925 - protein, 15 aa, Severe acute respiratory syndrome-related coronavirus
  REGION 1..15: note = Table B: HLA-DQA1*01:03-B1*06:01L
  source 1..15: note = Severe acute respiratory syndrome coronavirus 2
GKAKKGAWNIGEQKS

SEQ ID NO: 25926 - protein, 10 aa, Severe acute respiratory syndrome-related coronavirus
  REGION 1..10: note = Table B: HLA-DQA1*01:03-B1*06:01L
  source 1..10: note = Severe acute respiratory syndrome coronavirus 2
YITGGVVQLT

SEQ ID NO: 25927 - protein, 10 aa, Severe acute respiratory syndrome-related coronavirus
  REGION 1..10: note = Table B: HLA-DQA1*01:03-B1*06:01L
  source 1..10: note = Severe acute respiratory syndrome coronavirus 2
ITGGVVQLTS

SEQ ID NO: 25928 - protein, 10 aa, Severe acute respiratory syndrome-related coronavirus
  REGION 1..10: note = Table B: HLA-DQA1*01:03-B1*06:01L
  source 1..10: note = Severe acute respiratory syndrome coronavirus 2
TGGVVQLTSQ

SEQ ID NO: 25929 - protein, 10 aa, Severe acute respiratory syndrome-related coronavirus
  REGION 1..10: note = Table B: HLA-DQA1*01:03-B1*06:01L
  source 1..10: note = Severe acute respiratory syndrome coronavirus 2
LTSQWLTNIF

SEQ ID NO: 25930 - protein, 11 aa, Severe acute respiratory syndrome-related coronavirus
  REGION 1..11: note = Table B: HLA-DQA1*01:03-B1*06:01L
  source 1..11: note = Severe acute respiratory syndrome coronavirus 2
QWLTNIFGTVY

SEQ ID NO: 25931 - protein, 10 aa, Severe acute respiratory syndrome-related coronavirus
  REGION 1..10: note = Table B: HLA-DQA1*01:03-B1*06:01L
  source 1..10: note = Severe acute respiratory syndrome coronavirus 2
IVGGQIVTCA

SEQ ID NO: 25932 - protein, 10 aa, Severe acute respiratory syndrome-related coronavirus
  REGION 1..10: note = Table B: HLA-DQA1*01:03-B1*06:01L
  source 1..10: note = Severe acute respiratory syndrome coronavirus 2
VGGQIVTCAK

SEQ ID NO: 25933 - protein, 10 aa, Severe acute respiratory syndrome-related coronavirus
  REGION 1..10: note = Table B: HLA-DQA1*01:03-B1*06:01L HLA-DQA1*02:01-B1*03:03L
  source 1..10: note = Severe acute respiratory syndrome coronavirus 2
IIGGAKLKAL

SEQ ID NO: 25934 - protein, 10 aa, Severe acute respiratory syndrome-related coronavirus
  REGION 1..10: note = Table B: HLA-DQA1*01:03-B1*06:01L
  source 1..10: note = Severe acute respiratory syndrome coronavirus 2
ETGLLMPLKA

SEQ ID NO: 25935 - protein, 10 aa, Severe acute respiratory syndrome-related coronavirus
  REGION 1..10: note = Table B: HLA-DQA1*01:03-B1*06:01L
  source 1..10: note = Severe acute respiratory syndrome coronavirus 2
TGLLMPLKAP

SEQ ID NO: 25936 - protein, 10 aa, Severe acute respiratory syndrome-related coronavirus
  REGION 1..10: note = Table B: HLA-DQA1*01:03-B1*06:01L
  source 1..10: note = Severe acute respiratory syndrome coronavirus 2
LMPLKAPKEI

SEQ ID NO: 25937 - protein, 12 aa, Severe acute respiratory syndrome-related coronavirus
  REGION 1..12: note = Table B: HLA-DQA1*01:03-B1*06:01L
  source 1..12: note = Severe acute respiratory syndrome coronavirus 2
LEGETLPTEVLT

SEQ ID NO: 25938 - protein, 10 aa, Severe acute respiratory syndrome-related coronavirus
  REGION 1..10: note = Table B: HLA-DQA1*01:03-B1*06:01L
  source 1..10: note = Severe acute respiratory syndrome coronavirus 2
VLKTGDLQPL

SEQ ID NO: 25939 - protein, 10 aa, Severe acute respiratory syndrome-related coronavirus
  REGION 1..10: note = Table B: HLA-DQA1*01:03-B1*06:01L
  source 1..10: note = Severe acute respiratory syndrome coronavirus 2
KTGDLQPLEQ

SEQ ID NO: 25940 - protein, 14 aa, Severe acute respiratory syndrome-related coronavirus
  REGION 1..14: note = Table B: HLA-DQA1*01:03-B1*06:01L HLA-DQA1*02:01-B1*03:03L
  source 1..14: note = Severe acute respiratory syndrome coronavirus 2
PLEQPTSEAVEAPL

SEQ ID NO: 25941 - protein, 12 aa, Severe acute respiratory syndrome-related coronavirus
  REGION 1..12: note = Table B: HLA-DQA1*01:03-B1*06:01L
  source 1..12: note = Severe acute respiratory syndrome coronavirus 2
ADAVIKTLQPVS

SEQ ID NO: 25942 - protein, 18 aa, Severe acute respiratory syndrome-related coronavirus
  REGION 1..18: note = Table B: HLA-DQA1*01:03-B1*06:01L
  source 1..18: note = Severe acute respiratory syndrome coronavirus 2
YPPDEDEEEGDCEEEEFE

SEQ ID NO: 25943 - protein, 10 aa, Severe acute respiratory syndrome-related coronavirus
  REGION 1..10: note = Table B: HLA-DQA1*01:03-B1*06:01L
  source 1..10: note = Severe acute respiratory syndrome coronavirus 2
ATSAALQPEE

SEQ ID NO: 25944 - protein, 16 aa, Severe acute respiratory syndrome-related coronavirus
  REGION 1..16: note = Table B: HLA-DQA1*01:03-B1*06:01L
  source 1..16: note = Severe acute respiratory syndrome coronavirus 2
QPEEEQEEDWLDDDSQ

SEQ ID NO: 25945 - protein, 13 aa, Severe acute respiratory syndrome-related coronavirus
  REGION 1..13: note = Table B: HLA-DQA1*01:03-B1*06:01L HLA-DQA1*02:01-B1*03:03L
  source 1..13: note = Severe acute respiratory syndrome coronavirus 2
SQQTVGQQDGSED

SEQ ID NO: 25946 - protein, 10 aa, Severe acute respiratory syndrome-related coronavirus
  REGION 1..10: note = Table B: HLA-DQA1*01:03-B1*06:01L
  source 1..10: note = Severe acute respiratory syndrome coronavirus 2
NQTTTIQTIV

SEQ ID NO: 25947 - protein, 11 aa, Severe acute respiratory syndrome-related coronavirus
  REGION 1..11: note = Table B: HLA-DQA1*01:03-B1*06:01L
  source 1..11: note = Severe acute respiratory syndrome coronavirus 2
VQTIEVNSFSG

SEQ ID NO: 25948 - protein, 11 aa, Severe acute respiratory syndrome-related coronavirus
  REGION 1..11: note = Table B: HLA-DQA1*01:03-B1*06:01L HLA-DQA1*02:01-B1*03:03L
  source 1..11: note = Severe acute respiratory syndrome coronavirus 2
VNAANVYLKHG

SEQ ID NO: 25949 - protein, 10 aa, Severe acute respiratory syndrome-related coronavirus
  REGION 1..10: note = Table B: HLA-DQA1*01:03-B1*06:01L HLA-DQA1*02:01-B1*03:03L
  source 1..10: note = Severe acute respiratory syndrome coronavirus 2
AGALNKATNN

SEQ ID NO: 25950 - protein, 11 aa, Severe acute respiratory syndrome-related coronavirus
  REGION 1..11: note = Table B: HLA-DQA1*01:03-B1*06:01L
  source 1..11: note = Severe acute respiratory syndrome coronavirus 2
ATNGPLKVGGS

SEQ ID NO: 25951 - protein, 10 aa, Severe acute respiratory syndrome-related coronavirus
  REGION 1..10: note = Table B: HLA-DQA1*01:03-B1*06:01L
  source 1..10: note = Severe acute respiratory syndrome coronavirus 2
GGSCVLSGHN

SEQ ID NO: 25952 - protein, 12 aa, Severe acute respiratory syndrome-related coronavirus
  REGION 1..12: note = Table B: HLA-DQA1*01:03-B1*06:01L
  source 1..12: note = Severe acute respiratory syndrome coronavirus 2
PNVNKGEDIQLL

SEQ ID NO: 25953 - protein, 10 aa, Severe acute respiratory syndrome-related coronavirus
  REGION 1..10: note = Table B: HLA-DQA1*01:03-B1*06:01L
  source 1..10: note = Severe acute respiratory syndrome coronavirus 2
NKGEDIQLLK

SEQ ID NO: 25954 - protein, 12 aa, Severe acute respiratory syndrome-related coronavirus
  REGION 1..12: note = Table B: HLA-DQA1*01:03-B1*06:01L
  source 1..12: note = Severe acute respiratory syndrome coronavirus 2
LLSAGIFGADPI

SEQ ID NO: 25955 - protein, 15 aa, Severe acute respiratory syndrome-related coronavirus
  REGION 1..15: note = Table B: HLA-DQA1*01:03-B1*06:01L
  source 1..15: note = Severe acute respiratory syndrome coronavirus 2
SEKQVEQKIAEIPKE

SEQ ID NO: 25956 - protein, 11 aa, Severe acute respiratory syndrome-related coronavirus
  REGION 1..11: note = Table B: HLA-DQA1*01:03-B1*06:01L
  source 1..11: note = Severe acute respiratory syndrome coronavirus 2
IKACVEEVTTT

SEQ ID NO: 25957 - protein, 10 aa, Severe acute respiratory syndrome-related coronavirus
  REGION 1..10: note = Table B: HLA-DQA1*01:03-B1*06:01L
  source 1..10: note = Severe acute respiratory syndrome coronavirus 2
TTTLEETKFL

SEQ ID NO: 25958 - protein, 11 aa, Severe acute respiratory syndrome-related coronavirus
  REGION 1..11: note = Table B: HLA-DQA1*01:03-B1*06:01L
  source 1..11: note = Severe acute respiratory syndrome coronavirus 2
PDSATLVSDID

SEQ ID NO: 25959 - protein, 10 aa, Severe acute respiratory syndrome-related coronavirus
  REGION 1..10: note = Table B: HLA-DQA1*01:03-B1*06:01L HLA-DQA1*02:01-B1*03:03L
  source 1..10: note = Severe acute respiratory syndrome coronavirus 2
TAVVIPTKKA

SEQ ID NO: 25960 - protein, 10 aa, Severe acute respiratory syndrome-related coronavirus
  REGION 1..10: note = Table B: HLA-DQA1*01:03-B1*06:01L
  source 1..10: note = Severe acute respiratory syndrome coronavirus 2
ETKAIVSTIQ

SEQ ID NO: 25961 - protein, 10 aa, Severe acute respiratory syndrome-related coronavirus
  REGION 1..10: note = Table B: HLA-DQA1*01:03-B1*06:01L
  source 1..10: note = Severe acute respiratory syndrome coronavirus 2
SKTTVASLIN

SEQ ID NO: 25962 - protein, 10 aa, Severe acute respiratory syndrome-related coronavirus
  REGION 1..10: note = Table B: HLA-DQA1*01:03-B1*06:01L
  source 1..10: note = Severe acute respiratory syndrome coronavirus 2
TVASLINTLN

SEQ ID NO: 25963 - protein, 12 aa, Severe acute respiratory syndrome-related coronavirus
  REGION 1..12: note = Table B: HLA-DQA1*01:03-B1*06:01L
  source 1..12: note = Severe acute respiratory syndrome coronavirus 2
NETLVTMPLGYV

SEQ ID NO: 25964 - protein, 11 aa, Severe acute respiratory syndrome-related coronavirus
  REGION 1..11: note = Table B: HLA-DQA1*01:03-B1*06:01L
  source 1..11: note = Severe acute respiratory syndrome coronavirus 2
VTHGLNLEEAA

SEQ ID NO: 25965 - protein, 12 aa, Severe acute respiratory syndrome-related coronavirus
  REGION 1..12: note = Table B: HLA-DQA1*01:03-B1*06:01L
  source 1..12: note = Severe acute respiratory syndrome coronavirus 2
SGQSTQLGIEFL

SEQ ID NO: 25966 - protein, 13 aa, Severe acute respiratory syndrome-related coronavirus
  REGION 1..13: note = Table B: HLA-DQA1*01:03-B1*06:01L
  source 1..13: note = Severe acute respiratory syndrome coronavirus 2
TSNPTTFHLDGEV

SEQ ID NO: 25967 - protein, 16 aa, Severe acute respiratory syndrome-related coronavirus
  REGION 1..16: note = Table B: HLA-DQA1*01:03-B1*06:01L
  source 1..16: note = Severe acute respiratory syndrome coronavirus 2
DNLKTLLSLREVRTIK

SEQ ID NO: 25968 - protein, 10 aa, Severe acute respiratory syndrome-related coronavirus
  REGION 1..10: note = Table B: HLA-DQA1*01:03-B1*06:01L
  source 1..10: note = Severe acute respiratory syndrome coronavirus 2
LDGADVTKIK

SEQ ID NO: 25969 - protein, 16 aa, Severe acute respiratory syndrome-related coronavirus
  REGION 1..16: note = Table B: HLA-DQA1*01:03-B1*06:01L
  source 1..16: note = Severe acute respiratory syndrome coronavirus 2
KPHNSHEGKTFYVLPN

SEQ ID NO: 25970 - protein, 11 aa, Severe acute respiratory syndrome-related coronavirus
  REGION 1..11: note = Table B: HLA-DQA1*01:03-B1*06:01L
  source 1..11: note = Severe acute respiratory syndrome coronavirus 2
ATALLTLQQIE

SEQ ID NO: 25971 - protein, 12 aa, Severe acute respiratory syndrome-related coronavirus
  REGION 1..12: note = Table B: HLA-DQA1*01:03-B1*06:01L
  source 1..12: note = Severe acute respiratory syndrome coronavirus 2
FNPPALQDAYYR

SEQ ID NO: 25972 - protein, 16 aa, Severe acute respiratory syndrome-related coronavirus
  REGION 1..16: note = Table B: HLA-DQA1*01:03-B1*06:01L
  source 1..16: note = Severe acute respiratory syndrome coronavirus 2
PPALQDAYYRARAGEA

SEQ ID NO: 25973 - protein, 12 aa, Severe acute respiratory syndrome-related coronavirus
  REGION 1..12: note = Table B: HLA-DQA1*01:03-B1*06:01L
  source 1..12: note = Severe acute respiratory syndrome coronavirus 2
ARAGEAANFCAL

SEQ ID NO: 25974 - protein, 10 aa, Severe acute respiratory syndrome-related coronavirus
  REGION 1..10: note = Table B: HLA-DQA1*01:03-B1*06:01L
  source 1..10: note = Severe acute respiratory syndrome coronavirus 2
ELGDVRETMS

SEQ ID NO: 25975 - protein, 13 aa, Severe acute respiratory syndrome-related coronavirus
  REGION 1..13: note = Table B: HLA-DQA1*01:03-B1*06:01L
  source 1..13: note = Severe acute respiratory syndrome coronavirus 2
GVQIPCTCGKQAT

SEQ ID NO: 25976 - protein, 13 aa, Severe acute respiratory syndrome-related coronavirus
  REGION 1..13: note = Table B: HLA-DQA1*01:03-B1*06:01L
  source 1..13: note = Severe acute respiratory syndrome coronavirus 2
VQIPCTCGKQATK

SEQ ID NO: 25977 - protein, 12 aa, Severe acute respiratory syndrome-related coronavirus
  REGION 1..12: note = Table B: HLA-DQA1*01:03-B1*06:01L
  source 1..12: note = Severe acute respiratory syndrome coronavirus 2
MMSAPPAQYELK

SEQ ID NO: 25978 - protein, 13 aa, Severe acute respiratory syndrome-related coronavirus
  REGION 1..13: note = Table B: HLA-DQA1*01:03-B1*06:01L
  source 1..13: note = Severe acute respiratory syndrome coronavirus 2
GTFTCASEYTGNY

SEQ ID NO: 25979 - protein, 11 aa, Severe acute respiratory syndrome-related coronavirus
  REGION 1..11: note = Table B: HLA-DQA1*01:03-B1*06:01L
  source 1..11: note = Severe acute respiratory syndrome coronavirus 2
VVCTEIDPKLD

SEQ ID NO: 25980 - protein, 14 aa, Severe acute respiratory syndrome-related coronavirus
  REGION 1..14: note = Table B: HLA-DQA1*01:03-B1*06:01L
  source 1..14: note = Severe acute respiratory syndrome coronavirus 2
IKFADDLNQLTGYK

SEQ ID NO: 25981 - protein, 11 aa, Severe acute respiratory syndrome-related coronavirus
  REGION 1..11: note = Table B: HLA-DQA1*01:03-B1*06:01L
  source 1..11: note = Severe acute respiratory syndrome coronavirus 2
TNKATYKPNTW

SEQ ID NO: 25982 - protein, 10 aa, Severe acute respiratory syndrome-related coronavirus
  REGION 1..10: note = Table B: HLA-DQA1*01:03-B1*06:01L HLA-DQA1*02:01-B1*03:03L
  source 1..10: note = Severe acute respiratory syndrome coronavirus 2
LWSTKPVETS

SEQ ID NO: 25983 - protein, 13 aa, Severe acute respiratory syndrome-related coronavirus
  REGION 1..13: note = Table B: HLA-DQA1*01:03-B1*06:01L HLA-DQA1*02:01-B1*03:03L
  source 1..13: note = Severe acute respiratory syndrome coronavirus 2
PVSEEVVENPTIQ

SEQ ID NO: 25984 - protein, 12 aa, Severe acute respiratory syndrome-related coronavirus
  REGION 1..12: note = Table B: HLA-DQA1*01:03-B1*06:01L
  source 1..12: note = Severe acute respiratory syndrome coronavirus 2
KDVLECNVKTTE

SEQ ID NO: 25985 - protein, 10 aa, Severe acute respiratory syndrome-related coronavirus
  REGION 1..10: note = Table B: HLA-DQA1*01:03-B1*06:01L
  source 1..10: note = Severe acute respiratory syndrome coronavirus 2
LATHGLAAVN

SEQ ID NO: 25986 - protein, 10 aa, Severe acute respiratory syndrome-related coronavirus
  REGION 1..10: note = Table B: HLA-DQA1*01:03-B1*06:01L
  source 1..10: note = Severe acute respiratory syndrome coronavirus 2
TTNIVTRCLN

SEQ ID NO: 25987 - protein, 10 aa, Severe acute respiratory syndrome-related coronavirus
  REGION 1..10: note = Table B: HLA-DQA1*01:03-B1*06:01L
  source 1..10: note = Severe acute respiratory syndrome coronavirus 2
YSTAALGVLM

SEQ ID NO: 25988 - protein, 11 aa, Severe acute respiratory syndrome-related coronavirus
  REGION 1..11: note = Table B: HLA-DQA1*01:03-B1*06:01L
  source 1..11: note = Severe acute respiratory syndrome coronavirus 2
STAALGVLMSN

SEQ ID NO: 25989 - protein, 13 aa, Severe acute respiratory syndrome-related coronavirus
  REGION 1..13: note = Table B: HLA-DQA1*01:03-B1*06:01L
  source 1..13: note = Severe acute respiratory syndrome coronavirus 2
GSIPCSVCLSGLD

SEQ ID NO: 25990 - protein, 15 aa, Severe acute respiratory syndrome-related coronavirus
  REGION 1..15: note = Table B: HLA-DQA1*01:03-B1*06:01L
  source 1..15: note = Severe acute respiratory syndrome coronavirus 2
VDGCNSSTCMMCYKR

SEQ ID NO: 25991 - protein, 10 aa, Severe acute respiratory syndrome-related coronavirus
  REGION 1..10: note = Table B: HLA-DQA1*01:03-B1*06:01L
  source 1..10: note = Severe acute respiratory syndrome coronavirus 2
TTIVNGVRRS

SEQ ID NO: 25992 - protein, 10 aa, Severe acute respiratory syndrome-related coronavirus
  REGION 1..10: note = Table B: HLA-DQA1*01:03-B1*06:01L
  source 1..10: note = Severe acute respiratory syndrome coronavirus 2
VKNGSIHLYF

SEQ ID NO: 25993 - protein, 10 aa, Severe acute respiratory syndrome-related coronavirus
  REGION 1..10: note = Table B: HLA-DQA1*01:03-B1*06:01L HLA-DQA1*02:01-B1*03:03L
  source 1..10: note = Severe acute respiratory syndrome coronavirus 2
NGSIHLYFDK

SEQ ID NO: 25994 - protein, 11 aa, Severe acute respiratory syndrome-related coronavirus
  REGION 1..11: note = Table B: HLA-DQA1*01:03-B1*06:01L
  source 1..11: note = Severe acute respiratory syndrome coronavirus 2
NTKGSLPINVI

SEQ ID NO: 25995 - protein, 14 aa, Severe acute respiratory syndrome-related coronavirus
  REGION 1..14: note = Table B: HLA-DQA1*01:03-B1*06:01L
  source 1..14: note = Severe acute respiratory syndrome coronavirus 2
IVFDGKSKCEESSA

SEQ ID NO: 25996 - protein, 10 aa, Severe acute respiratory syndrome-related coronavirus
  REGION 1..10: note = Table B: HLA-DQA1*01:03-B1*06:01L HLA-DQA1*02:01-B1*03:03L
  source 1..10: note = Severe acute respiratory syndrome coronavirus 2
AKSASVYYSQ

SEQ ID NO: 25997 - protein, 12 aa, Severe acute respiratory syndrome-related coronavirus
  REGION 1..12: note = Table B: HLA-DQA1*01:03-B1*06:01L
  source 1..12: note = Severe acute respiratory syndrome coronavirus 2
MFDAYVNTFSST

SEQ ID NO: 25998 - protein, 10 aa, Severe acute respiratory syndrome-related coronavirus
  REGION 1..10: note = Table B: HLA-DQA1*01:03-B1*06:01L
  source 1..10: note = Severe acute respiratory syndrome coronavirus 2
FNVPMEKLKT

SEQ ID NO: 25999 - protein, 11 aa, Severe acute respiratory syndrome-related coronavirus
  REGION 1..11: note = Table B: HLA-DQA1*01:03-B1*06:01L
  source 1..11: note = Severe acute respiratory syndrome coronavirus 2
GFVDSDVETKD

SEQ ID NO: 26000 - protein, 11 aa, Severe acute respiratory syndrome-related coronavirus
  REGION 1..11: note = Table B: HLA-DQA1*01:03-B1*06:01L
  source 1..11: note = Severe acute respiratory syndrome coronavirus 2
DSDVETKDVVE

SEQ ID NO: 26001 - protein, 11 aa, Severe acute respiratory syndrome-related coronavirus
  REGION 1..11: note = Table B: HLA-DQA1*01:03-B1*06:01L
  source 1..11: note = Severe acute respiratory syndrome coronavirus 2
SHNIALIWNVK

SEQ ID NO: 26002 - protein, 10 aa, Severe acute respiratory syndrome-related coronavirus
  REGION 1..10: note = Table B: HLA-DQA1*01:03-B1*06:01L
  source 1..10: note = Severe acute respiratory syndrome coronavirus 2
KGGKIVNNWL

SEQ ID NO: 26003 - protein, 10 aa, Severe acute respiratory syndrome-related coronavirus
  REGION 1..10: note = Table B: HLA-DQA1*01:03-B1*06:01L HLA-DQA1*02:01-B1*03:03L
  source 1..10: note = Severe acute respiratory syndrome coronavirus 2
FSSEIIGYKA

SEQ ID NO: 26004 - protein, 11 aa, Severe acute respiratory syndrome-related coronavirus
  REGION 1..11: note = Table B: HLA-DQA1*01:03-B1*06:01L
  source 1..11: note = Severe acute respiratory syndrome coronavirus 2
DIASTDTCFAN

SEQ ID NO: 26005 - protein, 11 aa, Severe acute respiratory syndrome-related coronavirus
  REGION 1..11: note = Table B: HLA-DQA1*01:03-B1*06:01L HLA-DQA1*02:01-B1*03:03L
  source 1..11: note = Severe acute respiratory syndrome coronavirus 2
IASTDTCFANK

SEQ ID NO: 26006 - protein, 10 aa, Severe acute respiratory syndrome-related coronavirus
  REGION 1..10: note = Table B: HLA-DQA1*01:03-B1*06:01L
  source 1..10: note = Severe acute respiratory syndrome coronavirus 2
LPGTILRTTN

SEQ ID NO: 26007 - protein, 10 aa, Severe acute respiratory syndrome-related coronavirus
  REGION 1..10: note = Table B: HLA-DQA1*01:03-B1*06:01L HLA-DQA1*02:01-B1*03:03L
  source 1..10: note = Severe acute respiratory syndrome coronavirus 2
TILRTTNGDF

SEQ ID NO: 26008 - protein, 11 aa, Severe acute respiratory syndrome-related coronavirus
  REGION 1..11: note = Table B: HLA-DQA1*01:03-B1*06:01L
  source 1..11: note = Severe acute respiratory syndrome coronavirus 2
YTPSKLIEYTD

SEQ ID NO: 26009 - protein, 10 aa, Severe acute respiratory syndrome-related coronavirus
  REGION 1..10: note = Table B: HLA-DQA1*01:03-B1*06:01L
  source 1..10: note = Severe acute respiratory syndrome coronavirus 2
DTNVLEGSVA

SEQ ID NO: 26010 - protein, 11 aa, Severe acute respiratory syndrome-related coronavirus
  REGION 1..11: note = Table B: HLA-DQA1*01:03-B1*06:01L
  source 1..11: note = Severe acute respiratory syndrome coronavirus 2
LMDGSIIQFPN

SEQ ID NO: 26011 - protein, 14 aa, Severe acute respiratory syndrome-related coronavirus
  REGION 1..14: note = Table B: HLA-DQA1*01:03-B1*06:01L
  source 1..14: note = Severe acute respiratory syndrome coronavirus 2
EYCRHGTCERSEAG

SEQ ID NO: 26012 - protein, 11 aa, Severe acute respiratory syndrome-related coronavirus
  REGION 1..11: note = Table B: HLA-DQA1*01:03-B1*06:01L
  source 1..11: note = Severe acute respiratory syndrome coronavirus 2
VSTSGRWVLNN

SEQ ID NO: 26013 - protein, 11 aa, Severe acute respiratory syndrome-related coronavirus
  REGION 1..11: note = Table B: HLA-DQA1*01:03-B1*06:01L
  source 1..11: note = Severe acute respiratory syndrome coronavirus 2
STSGRWVLNND

SEQ ID NO: 26014 - protein, 11 aa, Severe acute respiratory syndrome-related coronavirus
  REGION 1..11: note = Table B: HLA-DQA1*01:03-B1*06:01L
  source 1..11: note = Severe acute respiratory syndrome coronavirus 2
SGRWVLNNDYY

SEQ ID NO: 26015 - protein, 10 aa, Severe acute respiratory syndrome-related coronavirus
  REGION 1..10: note = Table B: HLA-DQA1*01:03-B1*06:01L
  source 1..10: note = Severe acute respiratory syndrome coronavirus 2
IVAGGIVAIV

SEQ ID NO: 26016 - protein, 11 aa, Severe acute respiratory syndrome-related coronavirus
  REGION 1..11: note = Table B: HLA-DQA1*01:03-B1*06:01L
  source 1..11: note = Severe acute respiratory syndrome coronavirus 2
FNGVSFSTFEE

SEQ ID NO: 26017 - protein, 11 aa, Severe acute respiratory syndrome-related coronavirus
  REGION 1..11: note = Table B: HLA-DQA1*01:03-B1*06:01L
  source 1..11: note = Severe acute respiratory syndrome coronavirus 2
EAACCHLAKAL

SEQ ID NO: 26018 - protein, 12 aa, Severe acute respiratory syndrome-related coronavirus
  REGION 1..12: note = Table B: HLA-DQA1*01:03-B1*06:01L
  source 1..12: note = Severe acute respiratory syndrome coronavirus 2
AACCHLAKALND

SEQ ID NO: 26019 - protein, 12 aa, Severe acute respiratory syndrome-related coronavirus
  REGION 1..12: note = Table B: HLA-DQA1*01:03-B1*06:01L
  source 1..12: note = Severe acute respiratory syndrome coronavirus 2
SNSGSDVLYQPP

SEQ ID NO: 26020 - protein, 10 aa, Severe acute respiratory syndrome-related coronavirus
  REGION 1..10: note = Table B: HLA-DQA1*01:03-B1*06:01L
  source 1..10: note = Severe acute respiratory syndrome coronavirus 2
SITSAVLQSG

SEQ ID NO: 26021 - protein, 11 aa, Severe acute respiratory syndrome-related coronavirus
  REGION 1..11: note = Table B: HLA-DQA1*01:03-B1*06:01L
  source 1..11: note = Severe acute respiratory syndrome coronavirus 2
VEGCMVQVTCG

SEQ ID NO: 26022 - protein, 12 aa, Severe acute respiratory syndrome-related coronavirus
  REGION 1..12: note = Table B: HLA-DQA1*01:03-B1*06:01L
  source 1..12: note = Severe acute respiratory syndrome coronavirus 2
TTTLNGLWLDDV

SEQ ID NO: 26023 - protein, 14 aa, Severe acute respiratory syndrome-related coronavirus
  REGION 1..14: note = Table B: HLA-DQA1*01:03-B1*06:01L
  source 1..14: note = Severe acute respiratory syndrome coronavirus 2
VICTSEDMLNPNYE

SEQ ID NO: 26024 - protein, 12 aa, Severe acute respiratory syndrome-related coronavirus
  REGION 1..12: note = Table B: HLA-DQA1*01:03-B1*06:01L
  source 1..12: note = Severe acute respiratory syndrome coronavirus 2
SEDMLNPNYEDL

SEQ ID NO: 26025 - protein, 15 aa, Severe acute respiratory syndrome-related coronavirus
  REGION 1..15: note = Table B: HLA-DQA1*01:03-B1*06:01L
  source 1..15: note = Severe acute respiratory syndrome coronavirus 2
GHSMQNCVLKLKVDT

SEQ ID NO: 26026 - protein, 11 aa, Severe acute respiratory syndrome-related coronavirus
  REGION 1..11: note = Table B: HLA-DQA1*01:03-B1*06:01L
  source 1..11: note = Severe acute respiratory syndrome coronavirus 2
TANPKTPKYKF

SEQ ID NO: 26027 - protein, 12 aa, Severe acute respiratory syndrome-related coronavirus
  REGION 1..12: note = Table B: HLA-DQA1*01:03-B1*06:01L
  source 1..12: note = Severe acute respiratory syndrome coronavirus 2
PSGVYQCAMRPN

SEQ ID NO: 26028 - protein, 14 aa, Severe acute respiratory syndrome-related coronavirus
  REGION 1..14: note = Table B: HLA-DQA1*01:03-B1*06:01L
  source 1..14: note = Severe acute respiratory syndrome coronavirus 2
FLNGSCGSVGFNID

SEQ ID NO: 26029 - protein, 12 aa, Severe acute respiratory syndrome-related coronavirus
  REGION 1..12: note = Table B: HLA-DQA1*01:03-B1*06:01L HLA-DRB1*04:08L
  source 1..12: note = Severe acute respiratory syndrome coronavirus 2
LPTGVHAGTDLE

SEQ ID NO: 26030 - protein, 12 aa, Severe acute respiratory syndrome-related coronavirus
  REGION 1..12: note = Table B: HLA-DQA1*01:03-B1*06:01L
  source 1..12: note = Severe acute respiratory syndrome coronavirus 2
AGTDTTITVNVL

SEQ ID NO: 26031 - protein, 13 aa, Severe acute respiratory syndrome-related coronavirus
  REGION 1..13: note = Table B: HLA-DQA1*01:03-B1*06:01L
  source 1..13: note = Severe acute respiratory syndrome coronavirus 2
VLDMCASLKELLQ

SEQ ID NO: 26032 - protein, 10 aa, Severe acute respiratory syndrome-related coronavirus
  REGION 1..10: note = Table B: HLA-DQA1*01:03-B1*06:01L
  source 1..10: note = Severe acute respiratory syndrome coronavirus 2
ILGSALLEDE

SEQ ID NO: 26033 - protein, 12 aa, Severe acute respiratory syndrome-related coronavirus
  REGION 1..12: note = Table B: HLA-DQA1*01:03-B1*06:01L
  source 1..12: note = Severe acute respiratory syndrome coronavirus 2
LGSALLEDEFTP

SEQ ID NO: 26034 - protein, 10 aa, Severe acute respiratory syndrome-related coronavirus
  REGION 1..10: note = Table B: HLA-DQA1*01:03-B1*06:01L
  source 1..10: note = Severe acute respiratory syndrome coronavirus 2
SAFAMMFVKH

SEQ ID NO: 26035 - protein, 11 aa, Severe acute respiratory syndrome-related coronavirus
  REGION 1..11: note = Table B: HLA-DQA1*01:03-B1*06:01L
  source 1..11: note = Severe acute respiratory syndrome coronavirus 2
YFNMVYMPASW

SEQ ID NO: 26036 - protein, 11 aa, Severe acute respiratory syndrome-related coronavirus
  REGION 1..11: note = Table B: HLA-DQA1*01:03-B1*06:01L
  source 1..11: note = Severe acute respiratory syndrome coronavirus 2
VDTSLSGFKLK

SEQ ID NO: 26037 - protein, 10 aa, Severe acute respiratory syndrome-related coronavirus
  REGION 1..10: note = Table B: HLA-DQA1*01:03-B1*06:01L
  source 1..10: note = Severe acute respiratory syndrome coronavirus 2
LKDCVMYASA

SEQ ID NO: 26038 - protein, 10 aa, Severe acute respiratory syndrome-related coronavirus
  REGION 1..10: note = Table B: HLA-DQA1*01:03-B1*06:01L
  source 1..10: note = Severe acute respiratory syndrome coronavirus 2
LMTARTVYDD

SEQ ID NO: 26039 - protein, 14 aa, Severe acute respiratory syndrome-related coronavirus
  REGION 1..14: note = Table B: HLA-DQA1*01:03-B1*06:01L
  source 1..14: note = Severe acute respiratory syndrome coronavirus 2
GVGGKPCIKVATVQ

SEQ ID NO: 26040 - protein, 11 aa, Severe acute respiratory syndrome-related coronavirus
  REGION 1..11: note = Table B: HLA-DQA1*01:03-B1*06:01L
  source 1..11: note = Severe acute respiratory syndrome coronavirus 2
SSSKLWAQCVQ

SEQ ID NO: 26041 - protein, 11 aa, Severe acute respiratory syndrome-related coronavirus
  REGION 1..11: note = Table B: HLA-DQA1*01:03-B1*06:01L
  source 1..11: note = Severe acute respiratory syndrome coronavirus 2
NRATLQAIASE

SEQ ID NO: 26042 - protein, 13 aa, Severe acute respiratory syndrome-related coronavirus
  REGION 1..13: note = Table B: HLA-DQA1*01:03-B1*06:01L
  source 1..13: note = Severe acute respiratory syndrome coronavirus 2
SLPSYAAFATAQE

SEQ ID NO: 26043 - protein, 11 aa, Severe acute respiratory syndrome-related coronavirus
  REGION 1..11: note = Table B: HLA-DQA1*01:03-B1*06:01L HLA-DQA1*02:01-B1*03:03L
  source 1..11: note = Severe acute respiratory syndrome coronavirus 2
GDSEVVLKKLK

SEQ ID NO: 26044 - protein, 11 aa, Severe acute respiratory syndrome-related coronavirus
  REGION 1..11: note = Table B: HLA-DQA1*01:03-B1*06:01L
  source 1..11: note = Severe acute respiratory syndrome coronavirus 2
DQAMTQMYKQA

SEQ ID NO: 26045 - protein, 11 aa, Severe acute respiratory syndrome-related coronavirus
  REGION 1..11: note = Table B: HLA-DQA1*01:03-B1*06:01L
  source 1..11: note = Severe acute respiratory syndrome coronavirus 2
QAMTQMYKQAR

SEQ ID NO: 26046 - protein, 14 aa, Severe acute respiratory syndrome-related coronavirus
  REGION 1..14: note = Table B: HLA-DQA1*01:03-B1*06:01L
  source 1..14: note = Severe acute respiratory syndrome coronavirus 2
ARDGCVPLNIIPLT

SEQ ID NO: 26047 - protein, 11 aa, Severe acute respiratory syndrome-related coronavirus
  REGION 1..11: note = Table B: HLA-DQA1*01:03-B1*06:01L
  source 1..11: note = Severe acute respiratory syndrome coronavirus 2
TTAAKLMVVIP

SEQ ID NO: 26048 - protein, 11 aa, Severe acute respiratory syndrome-related coronavirus
  REGION 1..11: note = Table B: HLA-DQA1*01:03-B1*06:01L
  source 1..11: note = Severe acute respiratory syndrome coronavirus 2
TAAKLMVVIPD

SEQ ID NO: 26049 - protein, 12 aa, Severe acute respiratory syndrome-related coronavirus
  REGION 1..12: note = Table B: HLA-DQA1*01:03-B1*06:01L HLA-DRB1*15:03L
  source 1..12: note = Severe acute respiratory syndrome coronavirus 2
IQQVVDADSKIV

SEQ ID NO: 26050 - protein, 12 aa, Severe acute respiratory syndrome-related coronavirus
  REGION 1..12: note = Table B: HLA-DQA1*01:03-B1*06:01L
  source 1..12: note = Severe acute respiratory syndrome coronavirus 2
QNNELSPVALRQ

SEQ ID NO: 26051 - protein, 11 aa, Severe acute respiratory syndrome-related coronavirus
  REGION 1..11: note = Table B: HLA-DQA1*01:03-B1*06:01L
  source 1..11: note = Severe acute respiratory syndrome coronavirus 2
DLKWARFPKSD

SEQ ID NO: 26052 - protein, 12 aa, Severe acute respiratory syndrome-related coronavirus
  REGION 1..12: note = Table B: HLA-DQA1*01:03-B1*06:01L
  source 1..12: note = Severe acute respiratory syndrome coronavirus 2
SDGTGTIYTELE

SEQ ID NO: 26053 - protein, 10 aa, Severe acute respiratory syndrome-related coronavirus
  REGION 1..10: note = Table B: HLA-DQA1*01:03-B1*06:01L
  source 1..10: note = Severe acute respiratory syndrome coronavirus 2
NRGMVLGSLA

SEQ ID NO: 26054 - protein, 11 aa, Severe acute respiratory syndrome-related coronavirus
  REGION 1..11: note = Table B: HLA-DQA1*01:03-B1*06:01L
  source 1..11: note = Severe acute respiratory syndrome coronavirus 2
SFCAFAVDAAK

SEQ ID NO: 26055 - protein, 10 aa, Severe acute respiratory syndrome-related coronavirus
  REGION 1..10: note = Table B: HLA-DQA1*01:03-B1*06:01L HLA-DQA1*02:01-B1*03:03L
  source 1..10: note = Severe acute respiratory syndrome coronavirus 2
THTGTGQAIT

SEQ ID NO: 26056 - protein, 12 aa, Severe acute respiratory syndrome-related coronavirus
  REGION 1..12: note = Table B: HLA-DQA1*01:03-B1*06:01L
  source 1..12: note = Severe acute respiratory syndrome coronavirus 2
HTGTGQAITVTP

SEQ ID NO: 26057 - protein, 13 aa, Severe acute respiratory syndrome-related coronavirus
  REGION 1..13: note = Table B: HLA-DQA1*01:03-B1*06:01L
  source 1..13: note = Severe acute respiratory syndrome coronavirus 2
DQESFGGASCCLY

SEQ ID NO: 26058 - protein, 13 aa, Severe acute respiratory syndrome-related coronavirus
  REGION 1..13: note = Table B: HLA-DQA1*01:03-B1*06:01L
  source 1..13: note = Severe acute respiratory syndrome coronavirus 2
ESFGGASCCLYCR

SEQ ID NO: 26059 - protein, 14 aa, Severe acute respiratory syndrome-related coronavirus
  REGION 1..14: note = Table B: HLA-DQA1*01:03-B1*06:01L
  source 1..14: note = Severe acute respiratory syndrome coronavirus 2
WKGYGCSCDQLREP

SEQ ID NO: 26060 - protein, 11 aa, Severe acute respiratory syndrome-related coronavirus
  REGION 1..11: note = Table B: HLA-DQA1*01:03-B1*06:01L
  source 1..11: note = Severe acute respiratory syndrome coronavirus 2
PMLQSADAQSF

SEQ ID NO: 26061 - protein, 10 aa, Severe acute respiratory syndrome-related coronavirus
  REGION 1..10: note = Table B: HLA-DQA1*01:03-B1*06:01L
  source 1..10: note = Severe acute respiratory syndrome coronavirus 2
LQSADAQSFL

SEQ ID NO: 26062 - protein, 11 aa, Severe acute respiratory syndrome-related coronavirus
  REGION 1..11: note = Table B: HLA-DQA1*01:03-B1*06:01L
  source 1..11: note = Severe acute respiratory syndrome coronavirus 2
DAQSFLNRVCG

SEQ ID NO: 26063 - protein, 12 aa, Severe acute respiratory syndrome-related coronavirus
  REGION 1..12: note = Table B: HLA-DQA1*01:03-B1*06:01L
  source 1..12: note = Severe acute respiratory syndrome coronavirus 2
TDVVYRAFDIYN

SEQ ID NO: 26064 - protein, 15 aa, Severe acute respiratory syndrome-related coronavirus
  REGION 1..15: note = Table B: HLA-DQA1*01:03-B1*06:01L
  source 1..15: note = Severe acute respiratory syndrome coronavirus 2
AKFLKTNCCRFQEKD

SEQ ID NO: 26065 - protein, 14 aa, Severe acute respiratory syndrome-related coronavirus
  REGION 1..14: note = Table B: HLA-DQA1*01:03-B1*06:01L
  source 1..14: note = Severe acute respiratory syndrome coronavirus 2
FLKTNCCRFQEKDE

SEQ ID NO: 26066 - protein, 14 aa, Severe acute respiratory syndrome-related coronavirus
  REGION 1..14: note = Table B: HLA-DQA1*01:03-B1*06:01L
  source 1..14: note = Severe acute respiratory syndrome coronavirus 2
LKTNCCRFQEKDED

SEQ ID NO: 26067 - protein, 14 aa, Severe acute respiratory syndrome-related coronavirus
  REGION 1..14: note = Table B: HLA-DQA1*01:03-B1*06:01L
  source 1..14: note = Severe acute respiratory syndrome coronavirus 2
HEETIYNLLKDCPA

SEQ ID NO: 26068 - protein, 11 aa, Severe acute respiratory syndrome-related coronavirus
  REGION 1..11: note = Table B: HLA-DQA1*01:03-B1*06:01L
  source 1..11: note = Severe acute respiratory syndrome coronavirus 2
DGDMVPHISRQ

SEQ ID NO: 26069 - protein, 11 aa, Severe acute respiratory syndrome-related coronavirus
  REGION 1..11: note = Table B: HLA-DQA1*01:03-B1*06:01L
  source 1..11: note = Severe acute respiratory syndrome coronavirus 2
ANLGERVRQAL

SEQ ID NO: 26070 - protein, 11 aa, Severe acute respiratory syndrome-related coronavirus
  REGION 1..11: note = Table B: HLA-DQA1*01:03-B1*06:01L
  source 1..11: note = Severe acute respiratory syndrome coronavirus 2
MRNAGIVGVLT

SEQ ID NO: 26071 - protein, 13 aa, Severe acute respiratory syndrome-related coronavirus
  REGION 1..13: note = Table B: HLA-DQA1*01:03-B1*06:01L
  source 1..13: note = Severe acute respiratory syndrome coronavirus 2
TLDNQDLNGNWYD

SEQ ID NO: 26072 - protein, 12 aa, Severe acute respiratory syndrome-related coronavirus
  REGION 1..12: note = Table B: HLA-DQA1*01:03-B1*06:01L
  source 1..12: note = Severe acute respiratory syndrome coronavirus 2
PGSGVPVVDSYY

SEQ ID NO: 26073 - protein, 11 aa, Severe acute respiratory syndrome-related coronavirus
  REGION 1..11: note = Table B: HLA-DQA1*01:03-B1*06:01L
  source 1..11: note = Severe acute respiratory syndrome coronavirus 2
KYDFTEERLKL

SEQ ID NO: 26074 - protein, 10 aa, Severe acute respiratory syndrome-related coronavirus
  REGION 1..10: note = Table B: HLA-DQA1*01:03-B1*06:01L
  source 1..10: note = Severe acute respiratory syndrome coronavirus 2
SFGPLVRKIF

SEQ ID NO: 26075 - protein, 11 aa, Severe acute respiratory syndrome-related coronavirus
  REGION 1..11: note = Table B: HLA-DQA1*01:03-B1*06:01L
  source 1..11: note = Severe acute respiratory syndrome coronavirus 2
VVSTGYHFREL

SEQ ID NO: 26076 - protein, 11 aa, Severe acute respiratory syndrome-related coronavirus
  REGION 1..11: note = Table B: HLA-DQA1*01:03-B1*06:01L
  source 1..11: note = Severe acute respiratory syndrome coronavirus 2
VSTGYHFRELG

SEQ ID NO: 26077 - protein, 12 aa, Severe acute respiratory syndrome-related coronavirus
  REGION 1..12: note = Table B: HLA-DQA1*01:03-B1*06:01L HLA-DQA1*02:01-B1*03:03L
  source 1..12: note = Severe acute respiratory syndrome coronavirus 2
EDQDALFAYTKR

SEQ ID NO: 26078 - protein, 12 aa, Severe acute respiratory syndrome-related coronavirus
  REGION 1..12: note = Table B: HLA-DQA1*01:03-B1*06:01L HLA-DQA1*02:01-B1*03:03L
  source 1..12: note = Severe acute respiratory syndrome coronavirus 2
ITQMNLKYAISA

SEQ ID NO: 26079 - protein, 12 aa, Severe acute respiratory syndrome-related coronavirus
  REGION 1..12: note = Table B: HLA-DQA1*01:03-B1*06:01L
  source 1..12: note = Severe acute respiratory syndrome coronavirus 2
RTVAGVSICSTM

SEQ ID NO: 26080 - protein, 12 aa, Severe acute respiratory syndrome-related coronavirus
  REGION 1..12: note = Table B: HLA-DQA1*01:03-B1*06:01L
  source 1..12: note = Severe acute respiratory syndrome coronavirus 2
SICSTMTNRQFH

SEQ ID NO: 26081 - protein, 12 aa, Severe acute respiratory syndrome-related coronavirus
  REGION 1..12: note = Table B: HLA-DQA1*01:03-B1*06:01L
  source 1..12: note = Severe acute respiratory syndrome coronavirus 2
ICSTMTNRQFHQ

SEQ ID NO: 26082 - protein, 10 aa, Severe acute respiratory syndrome-related coronavirus
  REGION 1..10: note = Table B: HLA-DQA1*01:03-B1*06:01L HLA-DQA1*02:01-B1*03:03L
  source 1..10: note = Severe acute respiratory syndrome coronavirus 2
RGATVVIGTS

SEQ ID NO: 26083 - protein, 15 aa, Severe acute respiratory syndrome-related coronavirus
  REGION 1..15: note = Table B: HLA-DQA1*01:03-B1*06:01L
  source 1..15: note = Severe acute respiratory syndrome coronavirus 2
NPHLMGWDYPKCDRA

SEQ ID NO: 26084 - protein, 15 aa, Severe acute respiratory syndrome-related coronavirus
  REGION 1..15: note = Table B: HLA-DQA1*01:03-B1*06:01L
  source 1..15: note = Severe acute respiratory syndrome coronavirus 2
KPGGTSSGDATTAYA

SEQ ID NO: 26085 - protein, 11 aa, Severe acute respiratory syndrome-related coronavirus
  REGION 1..11: note = Table B: HLA-DQA1*01:03-B1*06:01L
  source 1..11: note = Severe acute respiratory syndrome coronavirus 2
TDFVNEFYAYL

SEQ ID NO: 26086 - protein, 12 aa, Severe acute respiratory syndrome-related coronavirus
  REGION 1..12: note = Table B: HLA-DQA1*01:03-B1*06:01L
  source 1..12: note = Severe acute respiratory syndrome coronavirus 2
DDAVVCFNSTYA

SEQ ID NO: 26087 - protein, 10 aa, Severe acute respiratory syndrome-related coronavirus
  REGION 1..10: note = Table B: HLA-DQA1*01:03-B1*06:01L HLA-DQA1*02:01-B1*03:03L
  source 1..10: note = Severe acute respiratory syndrome coronavirus 2
QNNVFMSEAK

SEQ ID NO: 26088 - protein, 11 aa, Severe acute respiratory syndrome-related coronavirus
  REGION 1..11: note = Table B: HLA-DQA1*01:03-B1*06:01L
  source 1..11: note = Severe acute respiratory syndrome coronavirus 2
DYVYLPYPDPS

SEQ ID NO: 26089 - protein, 17 aa, Severe acute respiratory syndrome-related coronavirus
  REGION 1..17: note = Table B: HLA-DQA1*01:03-B1*06:01L
  source 1..17: note = Severe acute respiratory syndrome coronavirus 2
PDPSRILGAGCFVDDIV

SEQ ID NO: 26090 - protein, 10 aa, Severe acute respiratory syndrome-related coronavirus
  REGION 1..10: note = Table B: HLA-DQA1*01:03-B1*06:01L
  source 1..10: note = Severe acute respiratory syndrome coronavirus 2
DGTLMIERFV

SEQ ID NO: 26091 - protein, 10 aa, Severe acute respiratory syndrome-related coronavirus
  REGION 1..10: note = Table B: HLA-DQA1*01:03-B1*06:01L
  source 1..10: note = Severe acute respiratory syndrome coronavirus 2
GTLMIERFVS

SEQ ID NO: 26092 - protein, 11 aa, Severe acute respiratory syndrome-related coronavirus
  REGION 1..11: note = Table B: HLA-DQA1*01:03-B1*06:01L
  source 1..11: note = Severe acute respiratory syndrome coronavirus 2
TGHMLDMYSVM

SEQ ID NO: 26093 - protein, 11 aa, Severe acute respiratory syndrome-related coronavirus
  REGION 1..11: note = Table B: HLA-DQA1*01:03-B1*06:01L
  source 1..11: note = Severe acute respiratory syndrome coronavirus 2
DNTSRYWEPEF

SEQ ID NO: 26094 - protein, 13 aa, Severe acute respiratory syndrome-related coronavirus
  REGION 1..13: note = Table B: HLA-DQA1*01:03-B1*06:01L
  source 1..13: note = Severe acute respiratory syndrome coronavirus 2
LQAVGACVLCNSQ

SEQ ID NO: 26095 - protein, 12 aa, Severe acute respiratory syndrome-related coronavirus
  REGION 1..12: note = Table B: HLA-DQA1*01:03-B1*06:01L
  source 1..12: note = Severe acute respiratory syndrome coronavirus 2
AVGACVLCNSQT

SEQ ID NO: 26096 - protein, 12 aa, Severe acute respiratory syndrome-related coronavirus
  REGION 1..12: note = Table B: HLA-DQA1*01:03-B1*06:01L
  source 1..12: note = Severe acute respiratory syndrome coronavirus 2
VGACVLCNSQTS

SEQ ID NO: 26097 - protein, 11 aa, Severe acute respiratory syndrome-related coronavirus
  REGION 1..11: note = Table B: HLA-DQA1*01:03-B1*06:01L
  source 1..11: note = Severe acute respiratory syndrome coronavirus 2
YDHVISTSHKL

SEQ ID NO: 26098 - protein, 14 aa, Severe acute respiratory syndrome-related coronavirus
  REGION 1..14: note = Table B: HLA-DQA1*01:03-B1*06:01L
  source 1..14: note = Severe acute respiratory syndrome coronavirus 2
ISTSHKLVLSVNPY

SEQ ID NO: 26099 - protein, 12 aa, Severe acute respiratory syndrome-related coronavirus
  REGION 1..12: note = Table B: HLA-DQA1*01:03-B1*06:01L HLA-DQA1*02:01-B1*03:03L
  source 1..12: note = Severe acute respiratory syndrome coronavirus 2
DVTDVTQLYLGG

SEQ ID NO: 26100 - protein, 15 aa, Severe acute respiratory syndrome-related coronavirus
  REGION 1..15: note = Table B: HLA-DQA1*01:03-B1*06:01L
  source 1..15: note = Severe acute respiratory syndrome coronavirus 2
GLYKNTCVGSDNVTD

SEQ ID NO: 26101 - protein, 12 aa, Severe acute respiratory syndrome-related coronavirus
  REGION 1..12: note = Table B: HLA-DQA1*01:03-B1*06:01L
  source 1..12: note = Severe acute respiratory syndrome coronavirus 2
AIATCDWTNAGD

SEQ ID NO: 26102 - protein, 12 aa, Severe acute respiratory syndrome-related coronavirus
  REGION 1..12: note = Table B: HLA-DQA1*01:03-B1*06:01L
  source 1..12: note = Severe acute respiratory syndrome coronavirus 2
DWTNAGDYILAN

SEQ ID NO: 26103 - protein, 11 aa, Severe acute respiratory syndrome-related coronavirus
  REGION 1..11: note = Table B: HLA-DQA1*01:03-B1*06:01L
  source 1..11: note = Severe acute respiratory syndrome coronavirus 2
TNAGDYILANT

SEQ ID NO: 26104 - protein, 13 aa, Severe acute respiratory syndrome-related coronavirus
  REGION 1..13: note = Table B: HLA-DQA1*01:03-B1*06:01L
  source 1..13: note = Severe acute respiratory syndrome coronavirus 2
LKATEETFKLSYG

SEQ ID NO: 26105 - protein, 13 aa, Severe acute respiratory syndrome-related coronavirus
  REGION 1..13: note = Table B: HLA-DQA1*01:03-B1*06:01L
  source 1..13: note = Severe acute respiratory syndrome coronavirus 2
YRVTKNSKVQIGE

SEQ ID NO: 26106 - protein, 11 aa, Severe acute respiratory syndrome-related coronavirus
  REGION 1..11: note = Table B: HLA-DQA1*01:03-B1*06:01L
  source 1..11: note = Severe acute respiratory syndrome coronavirus 2
NVGDYFVLTSH

SEQ ID NO: 26107 - protein, 11 aa, Severe acute respiratory syndrome-related coronavirus
  REGION 1..11: note = Table B: HLA-DQA1*01:03-B1*06:01L
  source 1..11: note = Severe acute respiratory syndrome coronavirus 2
TSHTVMPLSAP

SEQ ID NO: 26108 - protein, 11 aa, Severe acute respiratory syndrome-related coronavirus
  REGION 1..11: note = Table B: HLA-DQA1*01:03-B1*06:01L
  source 1..11: note = Severe acute respiratory syndrome coronavirus 2
LYPTLNISDEF

SEQ ID NO: 26109 - protein, 10 aa, Severe acute respiratory syndrome-related coronavirus
  REGION 1..10: note = Table B: HLA-DQA1*01:03-B1*06:01L
  source 1..10: note = Severe acute respiratory syndrome coronavirus 2
GTGKSHFAIG

SEQ ID NO: 26110 - protein, 13 aa, Severe acute respiratory syndrome-related coronavirus
  REGION 1..13: note = Table B: HLA-DQA1*01:03-B1*06:01L
  source 1..13: note = Severe acute respiratory syndrome coronavirus 2
SHAAVDALCEKAL

SEQ ID NO: 26111 - protein, 12 aa, Severe acute respiratory syndrome-related coronavirus
  REGION 1..12: note = Table B: HLA-DQA1*01:03-B1*06:01L HLA-DRB1*15:03L
  source 1..12: note = Severe acute respiratory syndrome coronavirus 2
AVDALCEKALKY

SEQ ID NO: 26112 - protein, 11 aa, Severe acute respiratory syndrome-related coronavirus
  REGION 1..11: note = Table B: HLA-DQA1*01:03-B1*06:01L
  source 1..11: note = Severe acute respiratory syndrome coronavirus 2
PETTADIVVFD

SEQ ID NO: 26113 - protein, 10 aa, Severe acute respiratory syndrome-related coronavirus
  REGION 1..10: note = Table B: HLA-DQA1*01:03-B1*06:01L
  source 1..10: note = Severe acute respiratory syndrome coronavirus 2
TTADIVVFDE

SEQ ID NO: 26114 - protein, 10 aa, Severe acute respiratory syndrome-related coronavirus
  REGION 1..10: note = Table B: HLA-DQA1*01:03-B1*06:01L
  source 1..10: note = Severe acute respiratory syndrome coronavirus 2
DTVSALVYDN

SEQ ID NO: 26115 - protein, 14 aa, Severe acute respiratory syndrome-related coronavirus
  REGION 1..14: note = Table B: HLA-DQA1*01:03-B1*06:01L
  source 1..14: note = Severe acute respiratory syndrome coronavirus 2
AHKDKSAQCFKMFY

SEQ ID NO: 26116 - protein, 12 aa, Severe acute respiratory syndrome-related coronavirus
  REGION 1..12: note = Table B: HLA-DQA1*01:03-B1*06:01L
  source 1..12: note = Severe acute respiratory syndrome coronavirus 2
QNAVASKILGLP

SEQ ID NO: 26117 - protein, 10 aa, Severe acute respiratory syndrome-related coronavirus
  REGION 1..10: note = Table B: HLA-DQA1*01:03-B1*06:01L
  source 1..10: note = Severe acute respiratory syndrome coronavirus 2
VASKILGLPT

SEQ ID NO: 26118 - protein, 14 aa, Severe acute respiratory syndrome-related coronavirus
  REGION 1..14: note = Table B: HLA-DQA1*01:03-B1*06:01L
  source 1..14: note = Severe acute respiratory syndrome coronavirus 2
DSSQGSEYDYVIFT

SEQ ID NO: 26119 - protein, 11 aa, Severe acute respiratory syndrome-related coronavirus
  REGION 1..11: note = Table B: HLA-DQA1*01:03-B1*06:01L
  source 1..11: note = Severe acute respiratory syndrome coronavirus 2
TQTTETAHSCN

SEQ ID NO: 26120 - protein, 10 aa, Severe acute respiratory syndrome-related coronavirus
  REGION 1..10: note = Table B: HLA-DQA1*01:03-B1*06:01L
  source 1..10: note = Severe acute respiratory syndrome coronavirus 2
TETAHSCNVN

SEQ ID NO: 26121 - protein, 10 aa, Severe acute respiratory syndrome-related coronavirus
  REGION 1..10: note = Table B: HLA-DQA1*01:03-B1*06:01L
  source 1..10: note = Severe acute respiratory syndrome coronavirus 2
NVTGLFKDCS

SEQ ID NO: 26122 - protein, 14 aa, Severe acute respiratory syndrome-related coronavirus
  REGION 1..14: note = Table B: HLA-DQA1*01:03-B1*06:01L
  source 1..14: note = Severe acute respiratory syndrome coronavirus 2
KTEGLCVDIPGIPK

SEQ ID NO: 26123 - protein, 11 aa, Severe acute respiratory syndrome-related coronavirus
  REGION 1..11: note = Table B: HLA-DQA1*01:03-B1*06:01L HLA-DQA1*02:01-B1*03:03L
  source 1..11: note = Severe acute respiratory syndrome coronavirus 2
VDIPGIPKDMT

SEQ ID NO: 26124 - protein, 12 aa, Severe acute respiratory syndrome-related coronavirus
  REGION 1..12: note = Table B: HLA-DQA1*01:03-B1*06:01L
  source 1..12: note = Severe acute respiratory syndrome coronavirus 2
DIPGIPKDMTYR

SEQ ID NO: 26125 - protein, 13 aa, Severe acute respiratory syndrome-related coronavirus
  REGION 1..13: note = Table B: HLA-DQA1*01:03-B1*06:01L
  source 1..13: note = Severe acute respiratory syndrome coronavirus 2
MFITREEAIRHVR

SEQ ID NO: 26126 - protein, 10 aa, Severe acute respiratory syndrome-related coronavirus
  REGION 1..10: note = Table B: HLA-DQA1*01:03-B1*06:01L
  source 1..10: note = Severe acute respiratory syndrome coronavirus 2
VEGCHATREA

SEQ ID NO: 26127 - protein, 11 aa, Severe acute respiratory syndrome-related coronavirus
  REGION 1..11: note = Table B: HLA-DQA1*01:03-B1*06:01L
  source 1..11: note = Severe acute respiratory syndrome coronavirus 2
FSTGVNLVAVP

SEQ ID NO: 26128 - protein, 10 aa, Severe acute respiratory syndrome-related coronavirus
  REGION 1..10: note = Table B: HLA-DQA1*01:03-B1*06:01L
  source 1..10: note = Severe acute respiratory syndrome coronavirus 2
MYKGLPWNVV

SEQ ID NO: 26129 - protein, 11 aa, Severe acute respiratory syndrome-related coronavirus
  REGION 1..11: note = Table B: HLA-DQA1*01:03-B1*06:01L
  source 1..11: note = Severe acute respiratory syndrome coronavirus 2
LSDTLKNLSDR

SEQ ID NO: 26130 - protein, 13 aa, Severe acute respiratory syndrome-related coronavirus
  REGION 1..13: note = Table B: HLA-DQA1*01:03-B1*06:01L
  source 1..13: note = Severe acute respiratory syndrome coronavirus 2
LSDRVVFVLWAHG

SEQ ID NO: 26131 - protein, 11 aa, Severe acute respiratory syndrome-related coronavirus
  REGION 1..11: note = Table B: HLA-DQA1*01:03-B1*06:01L
  source 1..11: note = Severe acute respiratory syndrome coronavirus 2
STASDTYACWH

SEQ ID NO: 26132 - protein, 13 aa, Severe acute respiratory syndrome-related coronavirus
  REGION 1..13: note = Table B: HLA-DQA1*01:03-B1*06:01L HLA-DQA1*02:01-B1*03:03L
  source 1..13: note = Severe acute respiratory syndrome coronavirus 2
DIGNPKAIKCVPQ

SEQ ID NO: 26133 - protein, 10 aa, Severe acute respiratory syndrome-related coronavirus
  REGION 1..10: note = Table B: HLA-DQA1*01:03-B1*06:01L
  source 1..10: note = Severe acute respiratory syndrome coronavirus 2
SAGFSLWVYK

SEQ ID NO: 26134 - protein, 15 aa, Severe acute respiratory syndrome-related coronavirus
  REGION 1..15: note = Table B: HLA-DQA1*01:03-B1*06:01L
  source 1..15: note = Severe acute respiratory syndrome coronavirus 2
VVNKGHFDGQQGEVP

SEQ ID NO: 26135 - protein, 12 aa, Severe acute respiratory syndrome-related coronavirus
  REGION 1..12: note = Table B: HLA-DQA1*01:03-B1*06:01L
  source 1..12: note = Severe acute respiratory syndrome coronavirus 2
QQGEVPVSIINN

SEQ ID NO: 26136 - protein, 11 aa, Severe acute respiratory syndrome-related coronavirus
  REGION 1..11: note = Table B: HLA-DQA1*01:03-B1*06:01L HLA-DQA1*02:01-B1*03:03L
  source 1..11: note = Severe acute respiratory syndrome coronavirus 2
DGVDVELFENK

SEQ ID NO: 26137 - protein, 14 aa, Severe acute respiratory syndrome-related coronavirus
  REGION 1..14: note = Table B: HLA-DQA1*01:03-B1*06:01L HLA-DRB1*08:02L
  source 1..14: note = Severe acute respiratory syndrome coronavirus 2
IWDYKRDAPAHIST

SEQ ID NO: 26138 - protein, 15 aa, Severe acute respiratory syndrome-related coronavirus
  REGION 1..15: note = Table B: HLA-DQA1*01:03-B1*06:01L
  source 1..15: note = Severe acute respiratory syndrome coronavirus 2
VDLFRNARNGVLITE

SEQ ID NO: 26139 - protein, 12 aa, Severe acute respiratory syndrome-related coronavirus
  REGION 1..12: note = Table B: HLA-DQA1*01:03-B1*06:01L
  source 1..12: note = Severe acute respiratory syndrome coronavirus 2
NARNGVLITEGS

SEQ ID NO: 26140 - protein, 12 aa, Severe acute respiratory syndrome-related coronavirus
  REGION 1..12: note = Table B: HLA-DQA1*01:03-B1*06:01L
  source 1..12: note = Severe acute respiratory syndrome coronavirus 2
ARNGVLITEGSV

SEQ ID NO: 26141 - protein, 14 aa, Severe acute respiratory syndrome-related coronavirus
  REGION 1..14: note = Table B: HLA-DQA1*01:03-B1*06:01L
  source 1..14: note = Severe acute respiratory syndrome coronavirus 2
LQPSVGPKQASLNG

SEQ ID NO: 26142 - protein, 12 aa, Severe acute respiratory syndrome-related coronavirus
  REGION 1..12: note = Table B: HLA-DQA1*01:03-B1*06:01L
  source 1..12: note = Severe acute respiratory syndrome coronavirus 2
KVDGVVQQLPET

SEQ ID NO: 26143 - protein, 12 aa, Severe acute respiratory syndrome-related coronavirus
  REGION 1..12: note = Table B: HLA-DQA1*01:03-B1*06:01L
  source 1..12: note = Severe acute respiratory syndrome coronavirus 2
QLPETYFTQSRN

SEQ ID NO: 26144 - protein, 11 aa, Severe acute respiratory syndrome-related coronavirus
  REGION 1..11: note = Table B: HLA-DQA1*01:03-B1*06:01L
  source 1..11: note = Severe acute respiratory syndrome coronavirus 2
SQLGGLHLLIG

SEQ ID NO: 26145 - protein, 13 aa, Severe acute respiratory syndrome-related coronavirus
  REGION 1..13: note = Table B: HLA-DQA1*01:03-B1*06:01L
  source 1..13: note = Severe acute respiratory syndrome coronavirus 2
TVKNYFITDAQTG

SEQ ID NO: 26146 - protein, 10 aa, Severe acute respiratory syndrome-related coronavirus
  REGION 1..10: note = Table B: HLA-DQA1*01:03-B1*06:01L
  source 1..10: note = Severe acute respiratory syndrome coronavirus 2
DDFVEIIKSQ

SEQ ID NO: 26147 - protein, 11 aa, Severe acute respiratory syndrome-related coronavirus
  REGION 1..11: note = Table B: HLA-DQA1*01:03-B1*06:01L
  source 1..11: note = Severe acute respiratory syndrome coronavirus 2
IKSQDLSVVSK

SEQ ID NO: 26148 - protein, 10 aa, Severe acute respiratory syndrome-related coronavirus
  REGION 1..10: note = Table B: HLA-DQA1*01:03-B1*06:01L
  source 1..10: note = Severe acute respiratory syndrome coronavirus 2
PKGIMMNVAK

SEQ ID NO: 26149 - protein, 13 aa, Severe acute respiratory syndrome-related coronavirus
  REGION 1..13: note = Table B: HLA-DQA1*01:03-B1*06:01L
  source 1..13: note = Severe acute respiratory syndrome coronavirus 2
KYTQLCQYLNTLT

SEQ ID NO: 26150 - protein, 12 aa, Severe acute respiratory syndrome-related coronavirus
  REGION 1..12: note = Table B: HLA-DQA1*01:03-B1*06:01L
  source 1..12: note = Severe acute respiratory syndrome coronavirus 2
APGTAVLRQWLP

SEQ ID NO: 26151 - protein, 12 aa, Severe acute respiratory syndrome-related coronavirus
  REGION 1..12: note = Table B: HLA-DQA1*01:03-B1*06:01L
  source 1..12: note = Severe acute respiratory syndrome coronavirus 2
GTAVLRQWLPTG

SEQ ID NO: 26152 - protein, 10 aa, Severe acute respiratory syndrome-related coronavirus
  REGION 1..10: note = Table B: HLA-DQA1*01:03-B1*06:01L
  source 1..10: note = Severe acute respiratory syndrome coronavirus 2
PTGTLLVDSD

SEQ ID NO: 26153 - protein, 13 aa, Severe acute respiratory syndrome-related coronavirus
  REGION 1..13: note = Table B: HLA-DQA1*01:03-B1*06:01L
  source 1..13: note = Severe acute respiratory syndrome coronavirus 2
VSDADSTLIGDCA

SEQ ID NO: 26154 - protein, 12 aa, Severe acute respiratory syndrome-related coronavirus
  REGION 1..12: note = Table B: HLA-DQA1*01:03-B1*06:01L
  source 1..12: note = Severe acute respiratory syndrome coronavirus 2
DADSTLIGDCAT

SEQ ID NO: 26155 - protein, 10 aa, Severe acute respiratory syndrome-related coronavirus
  REGION 1..10: note = Table B: HLA-DQA1*01:03-B1*06:01L
  source 1..10: note = Severe acute respiratory syndrome coronavirus 2
DCATVHTANK

SEQ ID NO: 26156 - protein, 12 aa, Severe acute respiratory syndrome-related coronavirus
  REGION 1..12: note = Table B: HLA-DQA1*01:03-B1*06:01L
  source 1..12: note = Severe acute respiratory syndrome coronavirus 2
VHTANKWDLIIS

SEQ ID NO: 26157 - protein, 12 aa, Severe acute respiratory syndrome-related coronavirus
  REGION 1..12: note = Table B: HLA-DQA1*01:03-B1*06:01L
  source 1..12: note = Severe acute respiratory syndrome coronavirus 2
VTKENDSKEGFF

SEQ ID NO: 26158 - protein, 10 aa, Severe acute respiratory syndrome-related coronavirus
  REGION 1..10: note = Table B: HLA-DQA1*01:03-B1*06:01L
  source 1..10: note = Severe acute respiratory syndrome coronavirus 2
ICGFIQQKLA

SEQ ID NO: 26159 - protein, 13 aa, Severe acute respiratory syndrome-related coronavirus
  REGION 1..13: note = Table B: HLA-DQA1*01:03-B1*06:01L
  source 1..13: note = Severe acute respiratory syndrome coronavirus 2
QQKLALGGSVAIK

SEQ ID NO: 26160 - protein, 11 aa, Severe acute respiratory syndrome-related coronavirus
  REGION 1..11: note = Table B: HLA-DQA1*01:03-B1*06:01L
  source 1..11: note = Severe acute respiratory syndrome coronavirus 2
NASSSEAFLIG

SEQ ID NO: 26161 - protein, 12 aa, Severe acute respiratory syndrome-related coronavirus
  REGION 1..12: note = Table B: HLA-DQA1*01:03-B1*06:01L
  source 1..12: note = Severe acute respiratory syndrome coronavirus 2
ASSSEAFLIGCN

SEQ ID NO: 26162 - protein, 15 aa, Severe acute respiratory syndrome-related coronavirus
  REGION 1..15: note = Table B: HLA-DQA1*01:03-B1*06:01L
  source 1..15: note = Severe acute respiratory syndrome coronavirus 2
SSEAFLIGCNYLGKP

SEQ ID NO: 26163 - protein, 14 aa, Severe acute respiratory syndrome-related coronavirus
  REGION 1..14: note = Table B: HLA-DQA1*01:03-B1*06:01L HLA-DRB1*15:03L
  source 1..14: note = Severe acute respiratory syndrome coronavirus 2
FLIGCNYLGKPREQ

SEQ ID NO: 26164 - protein, 14 aa, Severe acute respiratory syndrome-related coronavirus
  REGION 1..14: note = Table B: HLA-DQA1*01:03-B1*06:01L
  source 1..14: note = Severe acute respiratory syndrome coronavirus 2
TRGVYYPDKVFRSS

SEQ ID NO: 26165 - protein, 10 aa, Severe acute respiratory syndrome-related coronavirus
  REGION 1..10: note = Table B: HLA-DQA1*01:03-B1*06:01L
  source 1..10: note = Severe acute respiratory syndrome coronavirus 2
KRFDNPVLPF

SEQ ID NO: 26166 - protein, 13 aa, Severe acute respiratory syndrome-related coronavirus
  REGION 1..13: note = Table B: HLA-DQA1*01:03-B1*06:01L
  source 1..13: note = Severe acute respiratory syndrome coronavirus 2
LPFNDGVYFASTE

SEQ ID NO: 26167 - protein, 11 aa, Severe acute respiratory syndrome-related coronavirus
  REGION 1..11: note = Table B: HLA-DQA1*01:03-B1*06:01L
  source 1..11: note = Severe acute respiratory syndrome coronavirus 2
NDGVYFASTEK

SEQ ID NO: 26168 - protein, 10 aa, Severe acute respiratory syndrome-related coronavirus
  REGION 1..10: note = Table B: HLA-DQA1*01:03-B1*06:01L
  source 1..10: note = Severe acute respiratory syndrome coronavirus 2
ATNVVIKVCE

SEQ ID NO: 26169 - protein, 13 aa, Severe acute respiratory syndrome-related coronavirus
  REGION 1..13: note = Table B: HLA-DQA1*01:03-B1*06:01L
  source 1..13: note = Severe acute respiratory syndrome coronavirus 2
WMESEFRVYSSAN

SEQ ID NO: 26170 - protein, 12 aa, Severe acute respiratory syndrome-related coronavirus
  REGION 1..12: note = Table B: HLA-DQA1*01:03-B1*06:01L
  source 1..12: note = Severe acute respiratory syndrome coronavirus 2
ANNCTFEYVSQP

SEQ ID NO: 26171 - protein, 11 aa, Severe acute respiratory syndrome-related coronavirus
  REGION 1..11: note = Table B: HLA-DQA1*01:03-B1*06:01L
  source 1..11: note = Severe acute respiratory syndrome coronavirus 2
FQTLLALHRSY

SEQ ID NO: 26172 - protein, 13 aa, Severe acute respiratory syndrome-related coronavirus
  REGION 1..13: note = Table B: HLA-DQA1*01:03-B1*06:01L
  source 1..13: note = Severe acute respiratory syndrome coronavirus 2
SSGWTAGAAAYYV

SEQ ID NO: 26173 - protein, 10 aa, Severe acute respiratory syndrome-related coronavirus
  REGION 1..10: note = Table B: HLA-DQA1*01:03-B1*06:01L
  source 1..10: note = Severe acute respiratory syndrome coronavirus 2
TAGAAAYYVG

SEQ ID NO: 26174 - protein, 11 aa, Severe acute respiratory syndrome-related coronavirus
  REGION 1..11: note = Table B: HLA-DQA1*01:03-B1*06:01L
  source 1..11: note = Severe acute respiratory syndrome coronavirus 2
ISNCVADYSVL

SEQ ID NO: 26175 - protein, 10 aa, Severe acute respiratory syndrome-related coronavirus
  REGION 1..10: note = Table B: HLA-DQA1*01:03-B1*06:01L HLA-DQA1*02:01-B1*03:03L
  source 1..10: note = Severe acute respiratory syndrome coronavirus 2
GQTGKIADYN

SEQ ID NO: 26176 - protein, 10 aa, Severe acute respiratory syndrome-related coronavirus
  REGION 1..10: note = Table B: HLA-DQA1*01:03-B1*06:01L
  source 1..10: note = Severe acute respiratory syndrome coronavirus 2
TGCVIAWNSN

SEQ ID NO: 26177 - protein, 12 aa, Severe acute respiratory syndrome-related coronavirus
  REGION 1..12: note = Table B: HLA-DQA1*01:03-B1*06:01L
  source 1..12: note = Severe acute respiratory syndrome coronavirus 2
DISTEIYQAGST

SEQ ID NO: 26178 - protein, 11 aa, Severe acute respiratory syndrome-related coronavirus
  REGION 1..11: note = Table B: HLA-DQA1*01:03-B1*06:01L
  source 1..11: note = Severe acute respiratory syndrome coronavirus 2
NCYFPLQSYGF

SEQ ID NO: 26179 - protein, 10 aa, Severe acute respiratory syndrome-related coronavirus
  REGION 1..10: note = Table B: HLA-DQA1*01:03-B1*06:01L HLA-DQA1*02:01-B1*03:03L
  source 1..10: note = Severe acute respiratory syndrome coronavirus 2
TGTGVLTESN

SEQ ID NO: 26180 - protein, 11 aa, Severe acute respiratory syndrome-related coronavirus
  REGION 1..11: note = Table B: HLA-DQA1*01:03-B1*06:01L
  source 1..11: note = Severe acute respiratory syndrome coronavirus 2
DITPCSFGGVS

SEQ ID NO: 26181 - protein, 12 aa, Severe acute respiratory syndrome-related coronavirus
  REGION 1..12: note = Table B: HLA-DQA1*01:03-B1*06:01L
  source 1..12: note = Severe acute respiratory syndrome coronavirus 2
TNTSNQVAVLYQ

SEQ ID NO: 26182 - protein, 12 aa, Severe acute respiratory syndrome-related coronavirus
  REGION 1..12: note = Table B: HLA-DQA1*01:03-B1*06:01L
  source 1..12: note = Severe acute respiratory syndrome coronavirus 2
TSNQVAVLYQDV

SEQ ID NO: 26183 - protein, 10 aa, Severe acute respiratory syndrome-related coronavirus
  REGION 1..10: note = Table B: HLA-DQA1*01:03-B1*06:01L
  source 1..10: note = Severe acute respiratory syndrome coronavirus 2
NCTEVPVAIH

SEQ ID NO: 26184 - protein, 11 aa, Severe acute respiratory syndrome-related coronavirus
  REGION 1..11: note = Table B: HLA-DQA1*01:03-B1*06:01L
  source 1..11: note = Severe acute respiratory syndrome coronavirus 2
AGCLIGAEHVN

SEQ ID NO: 26185 - protein, 12 aa, Severe acute respiratory syndrome-related coronavirus
  REGION 1..12: note = Table B: HLA-DQA1*01:03-B1*06:01L
  source 1..12: note = Severe acute respiratory syndrome coronavirus 2
IGAGICASYQTQ

SEQ ID NO: 26186 - protein, 11 aa, Severe acute respiratory syndrome-related coronavirus
  REGION 1..11: note = Table B: HLA-DQA1*01:03-B1*06:01L
  source 1..11: note = Severe acute respiratory syndrome coronavirus 2
VASQSIIAYTM

SEQ ID NO: 26187 - protein, 12 aa, Severe acute respiratory syndrome-related coronavirus
  REGION 1..12: note = Table B: HLA-DQA1*01:03-B1*06:01L
  source 1..12: note = Severe acute respiratory syndrome coronavirus 2
STECSNLLLQYG

SEQ ID NO: 26188 - protein, 10 aa, Severe acute respiratory syndrome-related coronavirus
  REGION 1..10: note = Table B: HLA-DQA1*01:03-B1*06:01L
  source 1..10: note = Severe acute respiratory syndrome coronavirus 2
FCTQLNRALT

SEQ ID NO: 26189 - protein, 17 aa, Severe acute respiratory syndrome-related coronavirus
  REGION 1..17: note = Table B: HLA-DQA1*01:03-B1*06:01L
  source 1..17: note = Severe acute respiratory syndrome coronavirus 2
LPDPSKPSKRSFIEDLL

SEQ ID NO: 26190 - protein, 11 aa, Severe acute respiratory syndrome-related coronavirus
  REGION 1..11: note = Table B: HLA-DQA1*01:03-B1*06:01L
  source 1..11: note = Severe acute respiratory syndrome coronavirus 2
TLADAGFIKQY

SEQ ID NO: 26191 - protein, 13 aa, Severe acute respiratory syndrome-related coronavirus
  REGION 1..13: note = Table B: HLA-DQA1*01:03-B1*06:01L
  source 1..13: note = Severe acute respiratory syndrome coronavirus 2
LTDEMIAQYTSAL

SEQ ID NO: 26192 - protein, 10 aa, Severe acute respiratory syndrome-related coronavirus
  REGION 1..10: note = Table B: HLA-DQA1*01:03-B1*06:01L
  source 1..10: note = Severe acute respiratory syndrome coronavirus 2
TSALLAGTIT

SEQ ID NO: 26193 - protein, 10 aa, Severe acute respiratory syndrome-related coronavirus
  REGION 1..10: note = Table B: HLA-DQA1*01:03-B1*06:01L
  source 1..10: note = Severe acute respiratory syndrome coronavirus 2
ITSGWTFGAG

SEQ ID NO: 26194 - protein, 13 aa, Severe acute respiratory syndrome-related coronavirus
  REGION 1..13: note = Table B: HLA-DQA1*01:03-B1*06:01L
  source 1..13: note = Severe acute respiratory syndrome coronavirus 2
TSGWTFGAGAALQ

SEQ ID NO: 26195 - protein, 12 aa, Severe acute respiratory syndrome-related coronavirus
  REGION 1..12: note = Table B: HLA-DQA1*01:03-B1*06:01L
  source 1..12: note = Severe acute respiratory syndrome coronavirus 2
LSSNFGAISSVL

SEQ ID NO: 26196 - protein, 10 aa, Severe acute respiratory syndrome-related coronavirus
  REGION 1..10: note = Table B: HLA-DQA1*01:03-B1*06:01L
  source 1..10: note = Severe acute respiratory syndrome coronavirus 2
LAATKMSECV

SEQ ID NO: 26197 - protein, 10 aa, Severe acute respiratory syndrome-related coronavirus
  REGION 1..10: note = Table B: HLA-DQA1*01:03-B1*06:01L
  source 1..10: note = Severe acute respiratory syndrome coronavirus 2
NFTTAPAICH

SEQ ID NO: 26198 - protein, 10 aa, Severe acute respiratory syndrome-related coronavirus
  REGION 1..10: note = Table B: HLA-DQA1*01:03-B1*06:01L
  source 1..10: note = Severe acute respiratory syndrome coronavirus 2
TAPAICHDGK

SEQ ID NO: 26199 - protein, 13 aa, Severe acute respiratory syndrome-related coronavirus
  REGION 1..13: note = Table B: HLA-DQA1*01:03-B1*06:01L
  source 1..13: note = Severe acute respiratory syndrome coronavirus 2
TQRNFYEPQIITT

SEQ ID NO: 26200 - protein, 10 aa, Severe acute respiratory syndrome-related coronavirus
  REGION 1..10: note = Table B: HLA-DQA1*01:03-B1*06:01L
  source 1..10: note = Severe acute respiratory syndrome coronavirus 2
PQIITTDNTF

SEQ ID NO: 26201 - protein, 14 aa, Severe acute respiratory syndrome-related coronavirus
  REGION 1..14: note = Table B: HLA-DQA1*01:03-B1*06:01L
  source 1..14: note = Severe acute respiratory syndrome coronavirus 2
IITTDNTFVSGNCD

SEQ ID NO: 26202 - protein, 12 aa, Severe acute respiratory syndrome-related coronavirus
  REGION 1..12: note = Table B: HLA-DQA1*01:03-B1*06:01L
  source 1..12: note = Severe acute respiratory syndrome coronavirus 2
EDDSEPVLKGVK

SEQ ID NO: 26203 - protein, 12 aa, Severe acute respiratory syndrome-related coronavirus
  REGION 1..12: note = Table B: HLA-DQA1*01:03-B1*06:01L
  source 1..12: note = Severe acute respiratory syndrome coronavirus 2
VTLKQGEIKDAT

SEQ ID NO: 26204 - protein, 11 aa, Severe acute respiratory syndrome-related coronavirus
  REGION 1..11: note = Table B: HLA-DQA1*01:03-B1*06:01L
  source 1..11: note = Severe acute respiratory syndrome coronavirus 2
LKQGEIKDATP

SEQ ID NO: 26205 - protein, 12 aa, Severe acute respiratory syndrome-related coronavirus
  REGION 1..12: note = Table B: HLA-DQA1*01:03-B1*06:01L
  source 1..12: note = Severe acute respiratory syndrome coronavirus 2
TATIPIQASLPF

SEQ ID NO: 26206 - protein, 10 aa, Severe acute respiratory syndrome-related coronavirus
  REGION 1..10: note = Table B: HLA-DQA1*01:03-B1*06:01L
  source 1..10: note = Severe acute respiratory syndrome coronavirus 2
QSINFVRIIM

SEQ ID NO: 26207 - protein, 11 aa, Severe acute respiratory syndrome-related coronavirus
  REGION 1..11: note = Table B: HLA-DQA1*01:03-B1*06:01L
  source 1..11: note = Severe acute respiratory syndrome coronavirus 2
SVTSSIVITSG

SEQ ID NO: 26208 - protein, 13 aa, Severe acute respiratory syndrome-related coronavirus
  REGION 1..13: note = Table B: HLA-DQA1*01:03-B1*06:01L
  source 1..13: note = Severe acute respiratory syndrome coronavirus 2
YYQLYSTQLSTDT

SEQ ID NO: 26209 - protein, 10 aa, Severe acute respiratory syndrome-related coronavirus
  REGION 1..10: note = Table B: HLA-DQA1*01:03-B1*06:01L HLA-DQA1*02:01-B1*03:03L
  source 1..10: note = Severe acute respiratory syndrome coronavirus 2
SGVVNPVMEP

SEQ ID NO: 26210 - protein, 11 aa, Severe acute respiratory syndrome-related coronavirus
  REGION 1..11: note = Table B: HLA-DQA1*01:03-B1*06:01L
  source 1..11: note = Severe acute respiratory syndrome coronavirus 2
LGASQRVAGDS

SEQ ID NO: 26211 - protein, 14 aa, Severe acute respiratory syndrome-related coronavirus
  REGION 1..14: note = Table B: HLA-DQA1*01:03-B1*06:01L HLA-DRB1*15:01L
  source 1..14: note = Severe acute respiratory syndrome coronavirus 2
IGNYKLNTDHSSSS

SEQ ID NO: 26212 - protein, 12 aa, Severe acute respiratory syndrome-related coronavirus
  REGION 1..12: note = Table B: HLA-DQA1*01:03-B1*06:01L
  source 1..12: note = Severe acute respiratory syndrome coronavirus 2
DHSSSSDNIALL

SEQ ID NO: 26213 - protein, 13 aa, Severe acute respiratory syndrome-related coronavirus
  REGION 1..13: note = Table B: HLA-DQA1*01:03-B1*06:01L
  source 1..13: note = Severe acute respiratory syndrome coronavirus 2
HSSSSDNIALLVQ

SEQ ID NO: 26214 - protein, 10 aa, Severe acute respiratory syndrome-related coronavirus
  REGION 1..10: note = Table B: HLA-DQA1*01:03-B1*06:01L
  source 1..10: note = Severe acute respiratory syndrome coronavirus 2
ATCELYHYQE

SEQ ID NO: 26215 - protein, 10 aa, Severe acute respiratory syndrome-related coronavirus
  REGION 1..10: note = Table B: HLA-DQA1*01:03-B1*06:01L
  source 1..10: note = Severe acute respiratory syndrome coronavirus 2
FAFACPDGVK

SEQ ID NO: 26216 - protein, 11 aa, Severe acute respiratory syndrome-related coronavirus
  REGION 1..11: note = Table B: HLA-DQA1*01:03-B1*06:01L
  source 1..11: note = Severe acute respiratory syndrome coronavirus 2
GNYTVSCLPFT

SEQ ID NO: 26217 - protein, 11 aa, Severe acute respiratory syndrome-related coronavirus
  REGION 1..11: note = Table B: HLA-DQA1*01:03-B1*06:01L
  source 1..11: note = Severe acute respiratory syndrome coronavirus 2
PNNTASWFTAL

SEQ ID NO: 26218 - protein, 10 aa, Severe acute respiratory syndrome-related coronavirus
  REGION 1..10: note = Table B: HLA-DQA1*01:03-B1*06:01L
  source 1..10: note = Severe acute respiratory syndrome coronavirus 2
NTASWFTALT

SEQ ID NO: 26219 - protein, 14 aa, Severe acute respiratory syndrome-related coronavirus
  REGION 1..14: note = Table B: HLA-DQA1*01:03-B1*06:01L
  source 1..14: note = Severe acute respiratory syndrome coronavirus 2
NTNSSPDDQIGYYR

SEQ ID NO: 26220 - protein, 11 aa, Severe acute respiratory syndrome-related coronavirus
  REGION 1..11: note = Table B: HLA-DQA1*01:03-B1*06:01L
  source 1..11: note = Severe acute respiratory syndrome coronavirus 2
NKDGIIWVATE

SEQ ID NO: 26221 - protein, 11 aa, Severe acute respiratory syndrome-related coronavirus
  REGION 1..11: note = Table B: HLA-DQA1*01:03-B1*06:01L
  source 1..11: note = Severe acute respiratory syndrome coronavirus 2
NNAAIVLQLPQ

SEQ ID NO: 26222 - protein, 11 aa, Severe acute respiratory syndrome-related coronavirus
  REGION 1..11: note = Table B: HLA-DQA1*01:03-B1*06:01L
  source 1..11: note = Severe acute respiratory syndrome coronavirus 2
NAAIVLQLPQG

SEQ ID NO: 26223 - protein, 15 aa, Severe acute respiratory syndrome-related coronavirus
  REGION 1..15: note = Table B: HLA-DQA1*01:03-B1*06:01L
  source 1..15: note = Severe acute respiratory syndrome coronavirus 2
SRNSSRNSTPGSSRG

SEQ ID NO: 26224 - protein, 14 aa, Severe acute respiratory syndrome-related coronavirus
  REGION 1..14: note = Table B: HLA-DQA1*01:03-B1*06:01L
  source 1..14: note = Severe acute respiratory syndrome coronavirus 2
QQQGQTVTKKSAAE

SEQ ID NO: 26225 - protein, 13 aa, Severe acute respiratory syndrome-related coronavirus
  REGION 1..13: note = Table B: HLA-DQA1*01:03-B1*06:01L
  source 1..13: note = Severe acute respiratory syndrome coronavirus 2
EVTPSGTWLTYTG

SEQ ID NO: 26226 - protein, 13 aa, Severe acute respiratory syndrome-related coronavirus
  REGION 1..13: note = Table B: HLA-DQA1*01:03-B1*06:01L
  source 1..13: note = Severe acute respiratory syndrome coronavirus 2
VTPSGTWLTYTGA

SEQ ID NO: 26227 - protein, 10 aa, Severe acute respiratory syndrome-related coronavirus
  REGION 1..10: note = Table B: HLA-DQA1*01:03-B1*06:01L HLA-DQA1*02:01-B1*03:03L
  source 1..10: note = Severe acute respiratory syndrome coronavirus 2
TYTGAIKLDD

SEQ ID NO: 26228 - protein, 14 aa, Severe acute respiratory syndrome-related coronavirus
  REGION 1..14: note = Table B: HLA-DRB1*04:08L
  source 1..14: note = Severe acute respiratory syndrome coronavirus 2
KTHVQLSLPVLQVR

SEQ ID NO: 26229 - protein, 14 aa, Severe acute respiratory syndrome-related coronavirus
  REGION 1..14: note = Table B: HLA-DRB1*04:08L
  source 1..14: note = Severe acute respiratory syndrome coronavirus 2
VELVAELEGIQYGR

SEQ ID NO: 26230 - protein, 12 aa, Severe acute respiratory syndrome-related coronavirus
  REGION 1..12: note = Table B: HLA-DRB1*04:08L
  source 1..12: note = Severe acute respiratory syndrome coronavirus 2
EGIQYGRSGETL

SEQ ID NO: 26231 - protein, 14 aa, Severe acute respiratory syndrome-related coronavirus
  REGION 1..14: note = Table B: HLA-DRB1*04:08L HLA-DRB1*15:03L
  source 1..14: note = Severe acute respiratory syndrome coronavirus 2
GADLKSFDLGDELG

SEQ ID NO: 26232 - protein, 14 aa, Severe acute respiratory syndrome-related coronavirus
  REGION 1..14: note = Table B: HLA-DRB1*04:08L
  source 1..14: note = Severe acute respiratory syndrome coronavirus 2
NTKHSSGVTRELMR

SEQ ID NO: 26233 - protein, 13 aa, Severe acute respiratory syndrome-related coronavirus
  REGION 1..13: note = Table B: HLA-DRB1*04:08L
  source 1..13: note = Severe acute respiratory syndrome coronavirus 2
TRELMRELNGGAY

SEQ ID NO: 26234 - protein, 12 aa, Severe acute respiratory syndrome-related coronavirus
  REGION 1..12: note = Table B: HLA-DRB1*04:08L
  source 1..12: note = Severe acute respiratory syndrome coronavirus 2
LMRELNGGAYTR

SEQ ID NO: 26235 - protein, 13 aa, Severe acute respiratory syndrome-related coronavirus
  REGION 1..13: note = Table B: HLA-DRB1*04:08L
  source 1..13: note = Severe acute respiratory syndrome coronavirus 2
RELNGGAYTRYVD

SEQ ID NO: 26236 - protein, 15 aa, Severe acute respiratory syndrome-related coronavirus
  REGION 1..15: note = Table B: HLA-DRB1*04:08L
  source 1..15: note = Severe acute respiratory syndrome coronavirus 2
GAYTRYVDNNFCGPD

SEQ ID NO: 26237 - protein, 14 aa, Severe acute respiratory syndrome-related coronavirus
  REGION 1..14: note = Table B: HLA-DRB1*04:08L
  source 1..14: note = Severe acute respiratory syndrome coronavirus 2
EVGPEHSLAEYHNE

SEQ ID NO: 26238 - protein, 14 aa, Severe acute respiratory syndrome-related coronavirus
  REGION 1..14: note = Table B: HLA-DRB1*04:08L
  source 1..14: note = Severe acute respiratory syndrome coronavirus 2
IGCNHTGVVGEGSE

SEQ ID NO: 26239 - protein, 12 aa, Severe acute respiratory syndrome-related coronavirus
  REGION 1..12: note = Table B: HLA-DRB1*04:08L
  source 1..12: note = Severe acute respiratory syndrome coronavirus 2
VKGLDYKAFKQI

SEQ ID NO: 26240 - protein, 13 aa, Severe acute respiratory syndrome-related coronavirus
  REGION 1..13: note = Table B: HLA-DRB1*04:08L
  source 1..13: note = Severe acute respiratory syndrome coronavirus 2
NIGEQKSILSPLY

SEQ ID NO: 26241 - protein, 13 aa, Severe acute respiratory syndrome-related coronavirus
  REGION 1..13: note = Table B: HLA-DRB1*04:08L
  source 1..13: note = Severe acute respiratory syndrome coronavirus 2
VRSIFSRTLETAQ

SEQ ID NO: 26242 - protein, 13 aa, Severe acute respiratory syndrome-related coronavirus
  REGION 1..13: note = Table B: HLA-DRB1*04:08L
  source 1..13: note = Severe acute respiratory syndrome coronavirus 2
VYEKLKPVLDWLE

SEQ ID NO: 26243 - protein, 14 aa, Severe acute respiratory syndrome-related coronavirus
  REGION 1..14: note = Table B: HLA-DRB1*04:08L
  source 1..14: note = Severe acute respiratory syndrome coronavirus 2
FTLKGGAPTKVTFG

SEQ ID NO: 26244 - protein, 15 aa, Severe acute respiratory syndrome-related coronavirus
  REGION 1..15: note = Table B: HLA-DRB1*04:08L
  source 1..15: note = Severe acute respiratory syndrome coronavirus 2
ERIDKVLNEKCSAYT

SEQ ID NO: 26245 - protein, 13 aa, Severe acute respiratory syndrome-related coronavirus
  REGION 1..13: note = Table B: HLA-DRB1*04:08L
  source 1..13: note = Severe acute respiratory syndrome coronavirus 2
SGEFKLASHMYCS

SEQ ID NO: 26246 - protein, 14 aa, Severe acute respiratory syndrome-related coronavirus
  REGION 1..14: note = Table B: HLA-DRB1*04:08L
  source 1..14: note = Severe acute respiratory syndrome coronavirus 2
GKPLEFGATSAALQ

SEQ ID NO: 26247 - protein, 14 aa, Severe acute respiratory syndrome-related coronavirus
  REGION 1..14: note = Table B: HLA-DRB1*04:08L
  source 1..14: note = Severe acute respiratory syndrome coronavirus 2
TSAALQPEEEQEED

SEQ ID NO: 26248 - protein, 14 aa, Severe acute respiratory syndrome-related coronavirus
  REGION 1..14: note = Table B: HLA-DRB1*04:08L
  source 1..14: note = Severe acute respiratory syndrome coronavirus 2
IEVNSFSGYLKLTD

SEQ ID NO: 26249 - protein, 13 aa, Severe acute respiratory syndrome-related coronavirus
  REGION 1..13: note = Table B: HLA-DRB1*04:08L
  source 1..13: note = Severe acute respiratory syndrome coronavirus 2
AVFDKNLYDKLVS

SEQ ID NO: 26250 - protein, 13 aa, Severe acute respiratory syndrome-related coronavirus
  REGION 1..13: note = Table B: HLA-DRB1*04:08L
  source 1..13: note = Severe acute respiratory syndrome coronavirus 2
KNLYDKLVSSFLE

SEQ ID NO: 26251 - protein, 13 aa, Severe acute respiratory syndrome-related coronavirus
  REGION 1..13: note = Table B: HLA-DRB1*04:08L
  source 1..13: note = Severe acute respiratory syndrome coronavirus 2
TKFLTENLLLYID

SEQ ID NO: 26252 - protein, 12 aa, Severe acute respiratory syndrome-related coronavirus
  REGION 1..12: note = Table B: HLA-DRB1*04:08L
  source 1..12: note = Severe acute respiratory syndrome coronavirus 2
YIVGDVVQEGVL

SEQ ID NO: 26253 - protein, 11 aa, Severe acute respiratory syndrome-related coronavirus
  REGION 1..11: note = Table B: HLA-DRB1*04:08L
  source 1..11: note = Severe acute respiratory syndrome coronavirus 2
AIVSTIQRKYK

SEQ ID NO: 26254 - protein, 14 aa, Severe acute respiratory syndrome-related coronavirus
  REGION 1..14: note = Table B: HLA-DRB1*04:08L
  source 1..14: note = Severe acute respiratory syndrome coronavirus 2
STIQRKYKGIKIQE

SEQ ID NO: 26255 - protein, 15 aa, Severe acute respiratory syndrome-related coronavirus
  REGION 1..15: note = Table B: HLA-DRB1*04:08L
  source 1..15: note = Severe acute respiratory syndrome coronavirus 2
GVVDYGARFYFYTSK

SEQ ID NO: 26256 - protein, 13 aa, Severe acute respiratory syndrome-related coronavirus
  REGION 1..13: note = Table B: HLA-DRB1*04:08L
  source 1..13: note = Severe acute respiratory syndrome coronavirus 2
ETLVTMPLGYVTH

SEQ ID NO: 26257 - protein, 11 aa, Severe acute respiratory syndrome-related coronavirus
  REGION 1..11: note = Table B: HLA-DRB1*04:08L
  source 1..11: note = Severe acute respiratory syndrome coronavirus 2
SYLFQHANLDS

SEQ ID NO: 26258 - protein, 14 aa, Severe acute respiratory syndrome-related coronavirus
  REGION 1..14: note = Table B: HLA-DRB1*04:08L
  source 1..14: note = Severe acute respiratory syndrome coronavirus 2
KRVLNVVCKTCGQQ

SEQ ID NO: 26259 - protein, 16 aa, Severe acute respiratory syndrome-related coronavirus
  REGION 1..16: note = Table B: HLA-DRB1*04:08L
  source 1..16: note = Severe acute respiratory syndrome coronavirus 2
SSEYKGPITDVFYKEN

SEQ ID NO: 26260 - protein, 15 aa, Severe acute respiratory syndrome-related coronavirus
  REGION 1..15: note = Table B: HLA-DRB1*04:08L
  source 1..15: note = Severe acute respiratory syndrome coronavirus 2
IRCLWSTKPVETSNS

SEQ ID NO: 26261 - protein, 14 aa, Severe acute respiratory syndrome-related coronavirus
  REGION 1..14: note = Table B: HLA-DRB1*04:08L
  source 1..14: note = Severe acute respiratory syndrome coronavirus 2
KASMPTTIAKNTVK

SEQ ID NO: 26262 - protein, 11 aa, Severe acute respiratory syndrome-related coronavirus
  REGION 1..11: note = Table B: HLA-DRB1*04:08L
  source 1..11: note = Severe acute respiratory syndrome coronavirus 2
NYLKSPNFSKL

SEQ ID NO: 26263 - protein, 12 aa, Severe acute respiratory syndrome-related coronavirus
  REGION 1..12: note = Table B: HLA-DRB1*04:08L
  source 1..12: note = Severe acute respiratory syndrome coronavirus 2
YLKSPNFSKLIN

SEQ ID NO: 26264 - protein, 12 aa, Severe acute respiratory syndrome-related coronavirus
  REGION 1..12: note = Table B: HLA-DRB1*04:08L
  source 1..12: note = Severe acute respiratory syndrome coronavirus 2
SYFAVHFISNSW

SEQ ID NO: 26265 - protein, 13 aa, Severe acute respiratory syndrome-related coronavirus
  REGION 1..13: note = Table B: HLA-DRB1*04:08L
  source 1..13: note = Severe acute respiratory syndrome coronavirus 2
KSYVHVVDGCNSS

SEQ ID NO: 26266 - protein, 13 aa, Severe acute respiratory syndrome-related coronavirus
  REGION 1..13: note = Table B: HLA-DRB1*04:08L
  source 1..13: note = Severe acute respiratory syndrome coronavirus 2
TRVECTTIVNGVR

SEQ ID NO: 26267 - protein, 13 aa, Severe acute respiratory syndrome-related coronavirus
  REGION 1..13: note = Table B: HLA-DRB1*04:08L
  source 1..13: note = Severe acute respiratory syndrome coronavirus 2
EVARDLSLQFKRP

SEQ ID NO: 26268 - protein, 14 aa, Severe acute respiratory syndrome-related coronavirus
  REGION 1..14: note = Table B: HLA-DRB1*04:08L
  source 1..14: note = Severe acute respiratory syndrome coronavirus 2
GQKTYERHSLSHFV

SEQ ID NO: 26269 - protein, 13 aa, Severe acute respiratory syndrome-related coronavirus
  REGION 1..13: note = Table B: HLA-DRB1*04:08L
  source 1..13: note = Severe acute respiratory syndrome coronavirus 2
KTYERHSLSHFVN

SEQ ID NO: 26270 - protein, 15 aa, Severe acute respiratory syndrome-related coronavirus
  REGION 1..15: note = Table B: HLA-DRB1*04:08L
  source 1..15: note = Severe acute respiratory syndrome coronavirus 2
NAQVAKSHNIALIWN

SEQ ID NO: 26271 - protein, 16 aa, Severe acute respiratory syndrome-related coronavirus
  REGION 1..16: note = Table B: HLA-DRB1*04:08L
  source 1..16: note = Severe acute respiratory syndrome coronavirus 2
AQVAKSHNIALIWNVK

SEQ ID NO: 26272 - protein, 14 aa, Severe acute respiratory syndrome-related coronavirus
  REGION 1..14: note = Table B: HLA-DRB1*04:08L
  source 1..14: note = Severe acute respiratory syndrome coronavirus 2
ALKGGKIVNNWLKQ

SEQ ID NO: 26273 - protein, 11 aa, Severe acute respiratory syndrome-related coronavirus
  REGION 1..11: note = Table B: HLA-DRB1*04:08L
  source 1..11: note = Severe acute respiratory syndrome coronavirus 2
FYLITPVHVMS

SEQ ID NO: 26274 - protein, 14 aa, Severe acute respiratory syndrome-related coronavirus
  REGION 1..14: note = Table B: HLA-DRB1*04:08L
  source 1..14: note = Severe acute respiratory syndrome coronavirus 2
PVHVMSKHTDFSSE

SEQ ID NO: 26275 - protein, 12 aa, Severe acute respiratory syndrome-related coronavirus
  REGION 1..12: note = Table B: HLA-DRB1*04:08L
  source 1..12: note = Severe acute respiratory syndrome coronavirus 2
KAIDGGVTRDIA

SEQ ID NO: 26276 - protein, 13 aa, Severe acute respiratory syndrome-related coronavirus
  REGION 1..13: note = Table B: HLA-DRB1*04:08L
  source 1..13: note = Severe acute respiratory syndrome coronavirus 2
VGFVVPGLPGTIL

SEQ ID NO: 26277 - protein, 12 aa, Severe acute respiratory syndrome-related coronavirus
  REGION 1..12: note = Table B: HLA-DRB1*04:08L
  source 1..12: note = Severe acute respiratory syndrome coronavirus 2
FVVPGLPGTILR

SEQ ID NO: 26278 - protein, 15 aa, Severe acute respiratory syndrome-related coronavirus
  REGION 1..15: note = Table B: HLA-DRB1*04:08L
  source 1..15: note = Severe acute respiratory syndrome coronavirus 2
ILRTTNGDFLHFLPR

SEQ ID NO: 26279 - protein, 14 aa, Severe acute respiratory syndrome-related coronavirus
  REGION 1..14: note = Table B: HLA-DRB1*04:08L
  source 1..14: note = Severe acute respiratory syndrome coronavirus 2
PNTYLEGSVRVVTT

SEQ ID NO: 26280 - protein, 12 aa, Severe acute respiratory syndrome-related coronavirus
  REGION 1..12: note = Table B: HLA-DRB1*04:08L
  source 1..12: note = Severe acute respiratory syndrome coronavirus 2
DYYRSLPGVFCG

SEQ ID NO: 26281 - protein, 13 aa, Severe acute respiratory syndrome-related coronavirus
  REGION 1..13: note = Table B: HLA-DRB1*04:08L
  source 1..13: note = Severe acute respiratory syndrome coronavirus 2
SIVAGGIVAIVVT

SEQ ID NO: 26282 - protein, 12 aa, Severe acute respiratory syndrome-related coronavirus
  REGION 1..12: note = Table B: HLA-DRB1*04:08L
  source 1..12: note = Severe acute respiratory syndrome coronavirus 2
VLLPLTQYNRYL

SEQ ID NO: 26283 - protein, 12 aa, Severe acute respiratory syndrome-related coronavirus
  REGION 1..12: note = Table B: HLA-DRB1*04:08L
  source 1..12: note = Severe acute respiratory syndrome coronavirus 2
RYLALYNKYKYF

SEQ ID NO: 26284 - protein, 14 aa, Severe acute respiratory syndrome-related coronavirus
  REGION 1..14: note = Table B: HLA-DRB1*04:08L HLA-DQA1*02:01-B1*03:03L
  source 1..14: note = Severe acute respiratory syndrome coronavirus 2
REAACCHLAKALND

SEQ ID NO: 26285 - protein, 12 aa, Severe acute respiratory syndrome-related coronavirus
  REGION 1..12: note = Table B: HLA-DRB1*04:08L
  source 1..12: note = Severe acute respiratory syndrome coronavirus 2
PKYKFVRIQPGQ

SEQ ID NO: 26286 - protein, 14 aa, Severe acute respiratory syndrome-related coronavirus
  REGION 1..14: note = Table B: HLA-DRB1*04:08L
  source 1..14: note = Severe acute respiratory syndrome coronavirus 2
FCYMHHMELPTGVH

SEQ ID NO: 26287 - protein, 15 aa, Severe acute respiratory syndrome-related coronavirus
  REGION 1..15: note = Table B: HLA-DRB1*04:08L
  source 1..15: note = Severe acute respiratory syndrome coronavirus 2
VRQCSGVTFQSAVKR

SEQ ID NO: 26288 - protein, 14 aa, Severe acute respiratory syndrome-related coronavirus
  REGION 1..14: note = Table B: HLA-DRB1*04:08L
  source 1..14: note = Severe acute respiratory syndrome coronavirus 2
YDYLVSTQEFRYMN

SEQ ID NO: 26289 - protein, 14 aa, Severe acute respiratory syndrome-related coronavirus
  REGION 1..14: note = Table B: HLA-DRB1*04:08L
  source 1..14: note = Severe acute respiratory syndrome coronavirus 2
DYLVSTQEFRYMNS

SEQ ID NO: 26290 - protein, 15 aa, Severe acute respiratory syndrome-related coronavirus
  REGION 1..15: note = Table B: HLA-DRB1*04:08L
  source 1..15: note = Severe acute respiratory syndrome coronavirus 2
FPKSDGTGTIYTELE

SEQ ID NO: 26291 - protein, 13 aa, Severe acute respiratory syndrome-related coronavirus
  REGION 1..13: note = Table B: HLA-DRB1*04:08L
  source 1..13: note = Severe acute respiratory syndrome coronavirus 2
NNLNRGMVLGSLA

SEQ ID NO: 26292 - protein, 13 aa, Severe acute respiratory syndrome-related coronavirus
  REGION 1..13: note = Table B: HLA-DRB1*04:08L
  source 1..13: note = Severe acute respiratory syndrome coronavirus 2
SLAATVRLQAGNA

SEQ ID NO: 26293 - protein, 17 aa, Severe acute respiratory syndrome-related coronavirus
  REGION 1..17: note = Table B: HLA-DRB1*04:08L
  source 1..17: note = Severe acute respiratory syndrome coronavirus 2
NPKGFCDLKGKYVQIPT

SEQ ID NO: 26294 - protein, 14 aa, Severe acute respiratory syndrome-related coronavirus
  REGION 1..14: note = Table B: HLA-DRB1*04:08L
  source 1..14: note = Severe acute respiratory syndrome coronavirus 2
TPCGTGTSTDVVYR

SEQ ID NO: 26295 - protein, 15 aa, Severe acute respiratory syndrome-related coronavirus
  REGION 1..15: note = Table B: HLA-DRB1*04:08L
  source 1..15: note = Severe acute respiratory syndrome coronavirus 2
VRQALLKTVQFCDAM

SEQ ID NO: 26296 - protein, 13 aa, Severe acute respiratory syndrome-related coronavirus
  REGION 1..13: note = Table B: HLA-DRB1*04:08L HLA-DRB1*15:03L
  source 1..13: note = Severe acute respiratory syndrome coronavirus 2
FDRYFKYWDQTYH

SEQ ID NO: 26297 - protein, 15 aa, Severe acute respiratory syndrome-related coronavirus
  REGION 1..15: note = Table B: HLA-DRB1*04:08L
  source 1..15: note = Severe acute respiratory syndrome coronavirus 2
FNVLFSTVFPPTSFG

SEQ ID NO: 26298 - protein, 14 aa, Severe acute respiratory syndrome-related coronavirus
  REGION 1..14: note = Table B: HLA-DRB1*04:08L
  source 1..14: note = Severe acute respiratory syndrome coronavirus 2
STVFPPTSFGPLVR

SEQ ID NO: 26299 - protein, 13 aa, Severe acute respiratory syndrome-related coronavirus
  REGION 1..13: note = Table B: HLA-DRB1*04:08L
  source 1..13: note = Severe acute respiratory syndrome coronavirus 2
IFVDGVPFVVSTG

SEQ ID NO: 26300 - protein, 11 aa, Severe acute respiratory syndrome-related coronavirus
  REGION 1..11: note = Table B: HLA-DRB1*04:08L
  source 1..11: note = Severe acute respiratory syndrome coronavirus 2
PFVVSTGYHFR

SEQ ID NO: 26301 - protein, 12 aa, Severe acute respiratory syndrome-related coronavirus
  REGION 1..12: note = Table B: HLA-DRB1*04:08L
  source 1..12: note = Severe acute respiratory syndrome coronavirus 2
FYDFAVSKGFFK

SEQ ID NO: 26302 - protein, 14 aa, Severe acute respiratory syndrome-related coronavirus
  REGION 1..14: note = Table B: HLA-DRB1*04:08L
  source 1..14: note = Severe acute respiratory syndrome coronavirus 2
SSVELKHFFFAQDG

SEQ ID NO: 26303 - protein, 12 aa, Severe acute respiratory syndrome-related coronavirus
  REGION 1..12: note = Table B: HLA-DRB1*04:08L
  source 1..12: note = Severe acute respiratory syndrome coronavirus 2
AGFPFNKWGKAR

SEQ ID NO: 26304 - protein, 12 aa, Severe acute respiratory syndrome-related coronavirus
  REGION 1..12: note = Table B: HLA-DRB1*04:08L
  source 1..12: note = Severe acute respiratory syndrome coronavirus 2
MLRIMASLVLAR

SEQ ID NO: 26305 - protein, 11 aa, Severe acute respiratory syndrome-related coronavirus
  REGION 1..11: note = Table B: HLA-DRB1*04:08L
  source 1..11: note = Severe acute respiratory syndrome coronavirus 2
RFYRLANECAQ

SEQ ID NO: 26306 - protein, 14 aa, Severe acute respiratory syndrome-related coronavirus
  REGION 1..14: note = Table B: HLA-DRB1*04:08L
  source 1..14: note = Severe acute respiratory syndrome coronavirus 2
VRNLQHRLYECLYR

SEQ ID NO: 26307 - protein, 14 aa, Severe acute respiratory syndrome-related coronavirus
  REGION 1..14: note = Table B: HLA-DRB1*04:08L
  source 1..14: note = Severe acute respiratory syndrome coronavirus 2
RFVSLAIDAYPLTK

SEQ ID NO: 26308 - protein, 16 aa, Severe acute respiratory syndrome-related coronavirus
  REGION 1..16: note = Table B: HLA-DRB1*04:08L
  source 1..16: note = Severe acute respiratory syndrome coronavirus 2
VTQLYLGGMSYYCKSH

SEQ ID NO: 26309 - protein, 12 aa, Severe acute respiratory syndrome-related coronavirus
  REGION 1..12: note = Table B: HLA-DRB1*04:08L
  source 1..12: note = Severe acute respiratory syndrome coronavirus 2
SWEVGKPRPPLN

SEQ ID NO: 26310 - protein, 13 aa, Severe acute respiratory syndrome-related coronavirus
  REGION 1..13: note = Table B: HLA-DRB1*04:08L
  source 1..13: note = Severe acute respiratory syndrome coronavirus 2
RVTKNSKVQIGEY

SEQ ID NO: 26311 - protein, 15 aa, Severe acute respiratory syndrome-related coronavirus
  REGION 1..15: note = Table B: HLA-DRB1*04:08L
  source 1..15: note = Severe acute respiratory syndrome coronavirus 2
SKVQIGEYTFEKGDY

SEQ ID NO: 26312 - protein, 12 aa, Severe acute respiratory syndrome-related coronavirus
  REGION 1..12: note = Table B: HLA-DRB1*04:08L
  source 1..12: note = Severe acute respiratory syndrome coronavirus 2
AVVYRGTTTYKL

SEQ ID NO: 26313 - protein, 12 aa, Severe acute respiratory syndrome-related coronavirus
  REGION 1..12: note = Table B: HLA-DRB1*04:08L
  source 1..12: note = Severe acute respiratory syndrome coronavirus 2
GDPAQLPAPRTL

SEQ ID NO: 26314 - protein, 11 aa, Severe acute respiratory syndrome-related coronavirus
  REGION 1..11: note = Table B: HLA-DRB1*04:08L
  source 1..11: note = Severe acute respiratory syndrome coronavirus 2
KILGLPTQTVD

SEQ ID NO: 26315 - protein, 15 aa, Severe acute respiratory syndrome-related coronavirus
  REGION 1..15: note = Table B: HLA-DRB1*04:08L
  source 1..15: note = Severe acute respiratory syndrome coronavirus 2
GLHPTQAPTHLSVDT

SEQ ID NO: 26316 - protein, 12 aa, Severe acute respiratory syndrome-related coronavirus
  REGION 1..12: note = Table B: HLA-DRB1*04:08L
  source 1..12: note = Severe acute respiratory syndrome coronavirus 2
QFKHLIPLMYKG

SEQ ID NO: 26317 - protein, 12 aa, Severe acute respiratory syndrome-related coronavirus
  REGION 1..12: note = Table B: HLA-DRB1*04:08L
  source 1..12: note = Severe acute respiratory syndrome coronavirus 2
VFVLWAHGFELT

SEQ ID NO: 26318 - protein, 13 aa, Severe acute respiratory syndrome-related coronavirus
  REGION 1..13: note = Table B: HLA-DRB1*04:08L
  source 1..13: note = Severe acute respiratory syndrome coronavirus 2
HGFELTSMKYFVK

SEQ ID NO: 26319 - protein, 14 aa, Severe acute respiratory syndrome-related coronavirus
  REGION 1..14: note = Table B: HLA-DRB1*04:08L
  source 1..14: note = Severe acute respiratory syndrome coronavirus 2
DWTIEYPIIGDELK

SEQ ID NO: 26320 - protein, 13 aa, Severe acute respiratory syndrome-related coronavirus
  REGION 1..13: note = Table B: HLA-DRB1*04:08L
  source 1..13: note = Severe acute respiratory syndrome coronavirus 2
RVLSNLNLPGCDG

SEQ ID NO: 26321 - protein, 11 aa, Severe acute respiratory syndrome-related coronavirus
  REGION 1..11: note = Table B: HLA-DRB1*04:08L
  source 1..11: note = Severe acute respiratory syndrome coronavirus 2
AFDKSAFVNLK

SEQ ID NO: 26322 - protein, 13 aa, Severe acute respiratory syndrome-related coronavirus
  REGION 1..13: note = Table B: HLA-DRB1*04:08L
  source 1..13: note = Severe acute respiratory syndrome coronavirus 2
NVVNKGHFDGQQG

SEQ ID NO: 26323 - protein, 14 aa, Severe acute respiratory syndrome-related coronavirus
  REGION 1..14: note = Table B: HLA-DRB1*04:08L
  source 1..14: note = Severe acute respiratory syndrome coronavirus 2
PEVKILNNLGVDIA

SEQ ID NO: 26324 - protein, 13 aa, Severe acute respiratory syndrome-related coronavirus
  REGION 1..13: note = Table B: HLA-DRB1*04:08L
  source 1..13: note = Severe acute respiratory syndrome coronavirus 2
VKILNNLGVDIAA

SEQ ID NO: 26325 - protein, 13 aa, Severe acute respiratory syndrome-related coronavirus
  REGION 1..13: note = Table B: HLA-DRB1*04:08L
  source 1..13: note = Severe acute respiratory syndrome coronavirus 2
SVKGLQPSVGPKQ

SEQ ID NO: 26326 - protein, 14 aa, Severe acute respiratory syndrome-related coronavirus
  REGION 1..14: note = Table B: HLA-DRB1*04:08L
  source 1..14: note = Severe acute respiratory syndrome coronavirus 2
ASLNGVTLIGEAVK

SEQ ID NO: 26327 - protein, 14 aa, Severe acute respiratory syndrome-related coronavirus
  REGION 1..14: note = Table B: HLA-DRB1*04:08L
  source 1..14: note = Severe acute respiratory syndrome coronavirus 2
VVQQLPETYFTQSR

SEQ ID NO: 26328 - protein, 14 aa, Severe acute respiratory syndrome-related coronavirus
  REGION 1..14: note = Table B: HLA-DRB1*04:08L
  source 1..14: note = Severe acute respiratory syndrome coronavirus 2
LAMDEFIERYKLEG

SEQ ID NO: 26329 - protein, 12 aa, Severe acute respiratory syndrome-related coronavirus
  REGION 1..12: note = Table B: HLA-DRB1*04:08L
  source 1..12: note = Severe acute respiratory syndrome coronavirus 2
AFEHIVYGDFSH

SEQ ID NO: 26330 - protein, 16 aa, Severe acute respiratory syndrome-related coronavirus
  REGION 1..16: note = Table B: HLA-DRB1*04:08L
  source 1..16: note = Severe acute respiratory syndrome coronavirus 2
SHSQLGGLHLLIGLAK

SEQ ID NO: 26331 - protein, 13 aa, Severe acute respiratory syndrome-related coronavirus
  REGION 1..13: note = Table B: HLA-DRB1*04:08L
  source 1..13: note = Severe acute respiratory syndrome coronavirus 2
YTEISFMLWCKDG

SEQ ID NO: 26332 - protein, 13 aa, Severe acute respiratory syndrome-related coronavirus
  REGION 1..13: note = Table B: HLA-DRB1*04:08L
  source 1..13: note = Severe acute respiratory syndrome coronavirus 2
TEISFMLWCKDGH

SEQ ID NO: 26333 - protein, 14 aa, Severe acute respiratory syndrome-related coronavirus
  REGION 1..14: note = Table B: HLA-DRB1*04:08L
  source 1..14: note = Severe acute respiratory syndrome coronavirus 2
AGSDKGVAPGTAVL

SEQ ID NO: 26334 - protein, 11 aa, Severe acute respiratory syndrome-related coronavirus
  REGION 1..11: note = Table B: HLA-DRB1*04:08L
  source 1..11: note = Severe acute respiratory syndrome coronavirus 2
LIISDMYDPKT

SEQ ID NO: 26335 - protein, 12 aa, Severe acute respiratory syndrome-related coronavirus
  REGION 1..12: note = Table B: HLA-DRB1*04:08L
  source 1..12: note = Severe acute respiratory syndrome coronavirus 2
HSWNADLYKLMG

SEQ ID NO: 26336 - protein, 14 aa, Severe acute respiratory syndrome-related coronavirus
  REGION 1..14: note = Table B: HLA-DRB1*04:08L
  source 1..14: note = Severe acute respiratory syndrome coronavirus 2
NADLYKLMGHFAWW

SEQ ID NO: 26337 - protein, 13 aa, Severe acute respiratory syndrome-related coronavirus
  REGION 1..13: note = Table B: HLA-DRB1*04:08L
  source 1..13: note = Severe acute respiratory syndrome coronavirus 2
AWWTAFVTNVNAS

SEQ ID NO: 26338 - protein, 14 aa, Severe acute respiratory syndrome-related coronavirus
  REGION 1..14: note = Table B: HLA-DRB1*04:08L
  source 1..14: note = Severe acute respiratory syndrome coronavirus 2
LLSKGRLIIRENNR

SEQ ID NO: 26339 - protein, 13 aa, Severe acute respiratory syndrome-related coronavirus
  REGION 1..13: note = Table B: HLA-DRB1*04:08L
  source 1..13: note = Severe acute respiratory syndrome coronavirus 2
FTRGVYYPDKVFR

SEQ ID NO: 26340 - protein, 13 aa, Severe acute respiratory syndrome-related coronavirus
  REGION 1..13: note = Table B: HLA-DRB1*04:08L
  source 1..13: note = Severe acute respiratory syndrome coronavirus 2
SWMESEFRVYSSA

SEQ ID NO: 26341 - protein, 12 aa, Severe acute respiratory syndrome-related coronavirus
  REGION 1..12: note = Table B: HLA-DRB1*04:08L
  source 1..12: note = Severe acute respiratory syndrome coronavirus 2
NIDGYFKIYSKH

SEQ ID NO: 26342 - protein, 12 aa, Severe acute respiratory syndrome-related coronavirus
  REGION 1..12: note = Table B: HLA-DRB1*04:08L
  source 1..12: note = Severe acute respiratory syndrome coronavirus 2
IYSKHTPINLVR

SEQ ID NO: 26343 - protein, 13 aa, Severe acute respiratory syndrome-related coronavirus
  REGION 1..13: note = Table B: HLA-DRB1*04:08L
  source 1..13: note = Severe acute respiratory syndrome coronavirus 2
HRSYLTPGDSSSG

SEQ ID NO: 26344 - protein, 12 aa, Severe acute respiratory syndrome-related coronavirus
  REGION 1..12: note = Table B: HLA-DRB1*04:08L
  source 1..12: note = Severe acute respiratory syndrome coronavirus 2
GWTAGAAAYYVG

SEQ ID NO: 26345 - protein, 15 aa, Severe acute respiratory syndrome-related coronavirus
  REGION 1..15: note = Table B: HLA-DRB1*04:08L
  source 1..15: note = Severe acute respiratory syndrome coronavirus 2
AWNRKRISNCVADYS

SEQ ID NO: 26346 - protein, 11 aa, Severe acute respiratory syndrome-related coronavirus
  REGION 1..11: note = Table B: HLA-DRB1*04:08L
  source 1..11: note = Severe acute respiratory syndrome coronavirus 2
TFKCYGVSPTK

SEQ ID NO: 26347 - protein, 13 aa, Severe acute respiratory syndrome-related coronavirus
  REGION 1..13: note = Table B: HLA-DRB1*04:08L
  source 1..13: note = Severe acute respiratory syndrome coronavirus 2
RQIAPGQTGKIAD

SEQ ID NO: 26348 - protein, 14 aa, Severe acute respiratory syndrome-related coronavirus
  REGION 1..14: note = Table B: HLA-DRB1*04:08L
  source 1..14: note = Severe acute respiratory syndrome coronavirus 2
SYGFQPTNGVGYQP

SEQ ID NO: 26349 - protein, 14 aa, Severe acute respiratory syndrome-related coronavirus
  REGION 1..14: note = Table B: HLA-DRB1*04:08L
  source 1..14: note = Severe acute respiratory syndrome coronavirus 2
SVITPGTNTSNQVA

SEQ ID NO: 26350 - protein, 13 aa, Severe acute respiratory syndrome-related coronavirus
  REGION 1..13: note = Table B: HLA-DRB1*04:08L
  source 1..13: note = Severe acute respiratory syndrome coronavirus 2
VAIHADQLTPTWR

SEQ ID NO: 26351 - protein, 14 aa, Severe acute respiratory syndrome-related coronavirus
  REGION 1..14: note = Table B: HLA-DRB1*04:08L
  source 1..14: note = Severe acute respiratory syndrome coronavirus 2
RARSVASQSIIAYT

SEQ ID NO: 26352 - protein, 14 aa, Severe acute respiratory syndrome-related coronavirus
  REGION 1..14: note = Table B: HLA-DRB1*04:08L
  source 1..14: note = Severe acute respiratory syndrome coronavirus 2
VFAQVKQIYKTPPI

SEQ ID NO: 26353 - protein, 13 aa, Severe acute respiratory syndrome-related coronavirus
  REGION 1..13: note = Table B: HLA-DRB1*04:08L
  source 1..13: note = Severe acute respiratory syndrome coronavirus 2
VTLADAGFIKQYG

SEQ ID NO: 26354 - protein, 13 aa, Severe acute respiratory syndrome-related coronavirus
  REGION 1..13: note = Table B: HLA-DRB1*04:08L
  source 1..13: note = Severe acute respiratory syndrome coronavirus 2
QIPFAMQMAYRFN

SEQ ID NO: 26355 - protein, 12 aa, Severe acute respiratory syndrome-related coronavirus
  REGION 1..12: note = Table B: HLA-DRB1*04:08L
  source 1..12: note = Severe acute respiratory syndrome coronavirus 2
FNSAIGKIQDSL

SEQ ID NO: 26356 - protein, 14 aa, Severe acute respiratory syndrome-related coronavirus
  REGION 1..14: note = Table B: HLA-DRB1*04:08L
  source 1..14: note = Severe acute respiratory syndrome coronavirus 2
KIQDSLSSTASALG

SEQ ID NO: 26357 - protein, 15 aa, Severe acute respiratory syndrome-related coronavirus
  REGION 1..15: note = Table B: HLA-DRB1*04:08L
  source 1..15: note = Severe acute respiratory syndrome coronavirus 2
DKVEAEVQIDRLITG

SEQ ID NO: 26358 - protein, 12 aa, Severe acute respiratory syndrome-related coronavirus
  REGION 1..12: note = Table B: HLA-DRB1*04:08L
  source 1..12: note = Severe acute respiratory syndrome coronavirus 2
IDRLITGRLQSL

SEQ ID NO: 26359 - protein, 12 aa, Severe acute respiratory syndrome-related coronavirus
  REGION 1..12: note = Table B: HLA-DRB1*04:08L
  source 1..12: note = Severe acute respiratory syndrome coronavirus 2
QLIRAAEIRASA

SEQ ID NO: 26360 - protein, 14 aa, Severe acute respiratory syndrome-related coronavirus
  REGION 1..14: note = Table B: HLA-DRB1*04:08L
  source 1..14: note = Severe acute respiratory syndrome coronavirus 2
VFVSNGTHWFVTQR

SEQ ID NO: 26361 - protein, 14 aa, Severe acute respiratory syndrome-related coronavirus
  REGION 1..14: note = Table B: HLA-DRB1*04:08L
  source 1..14: note = Severe acute respiratory syndrome coronavirus 2
LNESLIDLQELGKY

SEQ ID NO: 26362 - protein, 12 aa, Severe acute respiratory syndrome-related coronavirus
  REGION 1..12: note = Table B: HLA-DRB1*04:08L
  source 1..12: note = Severe acute respiratory syndrome coronavirus 2
MRIFTIGTVTLK

SEQ ID NO: 26363 - protein, 12 aa, Severe acute respiratory syndrome-related coronavirus
  REGION 1..12: note = Table B: HLA-DRB1*04:08L
  source 1..12: note = Severe acute respiratory syndrome coronavirus 2
RIFTIGTVTLKQ

SEQ ID NO: 26364 - protein, 11 aa, Severe acute respiratory syndrome-related coronavirus
  REGION 1..11: note = Table B: HLA-DRB1*04:08L
  source 1..11: note = Severe acute respiratory syndrome coronavirus 2
FQSASKIITLK

SEQ ID NO: 26365 - protein, 15 aa, Severe acute respiratory syndrome-related coronavirus
  REGION 1..15: note = Table B: HLA-DRB1*04:08L
  source 1..15: note = Severe acute respiratory syndrome coronavirus 2
HTNCYDYCIPYNSVT

SEQ ID NO: 26366 - protein, 12 aa, Severe acute respiratory syndrome-related coronavirus
  REGION 1..12: note = Table B: HLA-DRB1*04:08L
  source 1..12: note = Severe acute respiratory syndrome coronavirus 2
SGDGTTSPISEH

SEQ ID NO: 26367 - protein, 16 aa, Severe acute respiratory syndrome-related coronavirus
  REGION 1..16: note = Table B: HLA-DRB1*04:08L
  source 1..16: note = Severe acute respiratory syndrome coronavirus 2
SPISEHDYQIGGYTEK

SEQ ID NO: 26368 - protein, 13 aa, Severe acute respiratory syndrome-related coronavirus
  REGION 1..13: note = Table B: HLA-DRB1*04:08L
  source 1..13: note = Severe acute respiratory syndrome coronavirus 2
HDYQIGGYTEKWE

SEQ ID NO: 26369 - protein, 15 aa, Severe acute respiratory syndrome-related coronavirus
  REGION 1..15: note = Table B: HLA-DRB1*04:08L
  source 1..15: note = Severe acute respiratory syndrome coronavirus 2
ESGVKDCVVLHSYFT

SEQ ID NO: 26370 - protein, 12 aa, Severe acute respiratory syndrome-related coronavirus
  REGION 1..12: note = Table B: HLA-DRB1*04:08L
  source 1..12: note = Severe acute respiratory syndrome coronavirus 2
SYFTSDYYQLYS

SEQ ID NO: 26371 - protein, 13 aa, Severe acute respiratory syndrome-related coronavirus
  REGION 1..13: note = Table B: HLA-DRB1*04:08L
  source 1..13: note = Severe acute respiratory syndrome coronavirus 2
HLRIAGHHLGRCD

SEQ ID NO: 26372 - protein, 15 aa, Severe acute respiratory syndrome-related coronavirus
  REGION 1..15: note = Table B: HLA-DRB1*04:08L
  source 1..15: note = Severe acute respiratory syndrome coronavirus 2
AGHHLGRCDIKDLPK

SEQ ID NO: 26373 - protein, 14 aa, Severe acute respiratory syndrome-related coronavirus
  REGION 1..14: note = Table B: HLA-DRB1*04:08L
  source 1..14: note = Severe acute respiratory syndrome coronavirus 2
PKEITVATSRTLSY

SEQ ID NO: 26374 - protein, 13 aa, Severe acute respiratory syndrome-related coronavirus
  REGION 1..13: note = Table B: HLA-DRB1*04:08L
  source 1..13: note = Severe acute respiratory syndrome coronavirus 2
EITVATSRTLSYY

SEQ ID NO: 26375 - protein, 15 aa, Severe acute respiratory syndrome-related coronavirus
  REGION 1..15: note = Table B: HLA-DRB1*04:08L
  source 1..15: note = Severe acute respiratory syndrome coronavirus 2
LRARSVSPKLFIRQE

SEQ ID NO: 26376 - protein, 13 aa, Severe acute respiratory syndrome-related coronavirus
  REGION 1..13: note = Table B: HLA-DRB1*04:08L
  source 1..13: note = Severe acute respiratory syndrome coronavirus 2
LFIRQEEVQELYS

SEQ ID NO: 26377 - protein, 14 aa, Severe acute respiratory syndrome-related coronavirus
  REGION 1..14: note = Table B: HLA-DRB1*04:08L
  source 1..14: note = Severe acute respiratory syndrome coronavirus 2
TTLPKGFYAEGSRG

SEQ ID NO: 26378 - protein, 15 aa, Severe acute respiratory syndrome-related coronavirus
  REGION 1..15: note = Table B: HLA-DRB1*04:08L
  source 1..15: note = Severe acute respiratory syndrome coronavirus 2
ESKMSGKGQQQQGQT

SEQ ID NO: 26379 - protein, 14 aa, Severe acute respiratory syndrome-related coronavirus
  REGION 1..14: note = Table B: HLA-DRB1*04:08L
  source 1..14: note = Severe acute respiratory syndrome coronavirus 2
VTKKSAAEASKKPR

SEQ ID NO: 26380 - protein, 14 aa, Severe acute respiratory syndrome-related coronavirus
  REGION 1..14: note = Table B: HLA-DRB1*04:08L
  source 1..14: note = Severe acute respiratory syndrome coronavirus 2
KKSAAEASKKPRQK

SEQ ID NO: 26381 - protein, 14 aa, Severe acute respiratory syndrome-related coronavirus
  REGION 1..14: note = Table B: HLA-DRB1*04:08L
  source 1..14: note = Severe acute respiratory syndrome coronavirus 2
KSAAEASKKPRQKR

SEQ ID NO: 26382 - protein, 14 aa, Severe acute respiratory syndrome-related coronavirus
  REGION 1..14: note = Table B: HLA-DRB1*04:08L
  source 1..14: note = Severe acute respiratory syndrome coronavirus 2
QKRTATKAYNVTQA

SEQ ID NO: 26383 - protein, 16 aa, Severe acute respiratory syndrome-related coronavirus
  REGION 1..16: note = Table B: HLA-DRB1*04:08L
  source 1..16: note = Severe acute respiratory syndrome coronavirus 2
DKKKKADETQALPQRQ

SEQ ID NO: 26384 - protein, 14 aa, Severe acute respiratory syndrome-related coronavirus
  REGION 1..14: note = Table B: HLA-DRB1*08:02L
  source 1..14: note = Severe acute respiratory syndrome coronavirus 2
AWYTERSEKSYELQ

SEQ ID NO: 26385 - protein, 14 aa, Severe acute respiratory syndrome-related coronavirus
  REGION 1..14: note = Table B: HLA-DRB1*08:02L
  source 1..14: note = Severe acute respiratory syndrome coronavirus 2
DAVIKTLQPVSELL

SEQ ID NO: 26386 - protein, 15 aa, Severe acute respiratory syndrome-related coronavirus
  REGION 1..15: note = Table B: HLA-DRB1*08:02L
  source 1..15: note = Severe acute respiratory syndrome coronavirus 2
EDDYQGKPLEFGATS

SEQ ID NO: 26387 - protein, 17 aa, Severe acute respiratory syndrome-related coronavirus
  REGION 1..17: note = Table B: HLA-DRB1*08:02L
  source 1..17: note = Severe acute respiratory syndrome coronavirus 2
VQPQLEMELTPVVQTIE

SEQ ID NO: 26388 - protein, 17 aa, Severe acute respiratory syndrome-related coronavirus
  REGION 1..17: note = Table B: HLA-DRB1*08:02L
  source 1..17: note = Severe acute respiratory syndrome coronavirus 2
VKPTVVVNAANVYLKHG

SEQ ID NO: 26389 - protein, 16 aa, Severe acute respiratory syndrome-related coronavirus
  REGION 1..16: note = Table B: HLA-DRB1*08:02L
  source 1..16: note = Severe acute respiratory syndrome coronavirus 2
VTTTLEETKFLTENLL

SEQ ID NO: 26390 - protein, 13 aa, Severe acute respiratory syndrome-related coronavirus
  REGION 1..13: note = Table B: HLA-DRB1*08:02L
  source 1..13: note = Severe acute respiratory syndrome coronavirus 2
FYFYTSKTTVASL

SEQ ID NO: 26391 - protein, 15 aa, Severe acute respiratory syndrome-related coronavirus
  REGION 1..15: note = Table B: HLA-DRB1*08:02L
  source 1..15: note = Severe acute respiratory syndrome coronavirus 2
DGEVITFDNLKTLLS

SEQ ID NO: 26392 - protein, 16 aa, Severe acute respiratory syndrome-related coronavirus
  REGION 1..16: note = Table B: HLA-DRB1*08:02L
  source 1..16: note = Severe acute respiratory syndrome coronavirus 2
YPQVNGLTSIKWADNN

SEQ ID NO: 26393 - protein, 14 aa, Severe acute respiratory syndrome-related coronavirus
  REGION 1..14: note = Table B: HLA-DRB1*08:02L
  source 1..14: note = Severe acute respiratory syndrome coronavirus 2
DLVPNQPYPNASFD

SEQ ID NO: 26394 - protein, 14 aa, Severe acute respiratory syndrome-related coronavirus
  REGION 1..14: note = Table B: HLA-DRB1*08:02L
  source 1..14: note = Severe acute respiratory syndrome coronavirus 2
SFDVLKSEDAQGMD

SEQ ID NO: 26395 - protein, 13 aa, Severe acute respiratory syndrome-related coronavirus
  REGION 1..13: note = Table B: HLA-DRB1*08:02L
  source 1..13: note = Severe acute respiratory syndrome coronavirus 2
AGSTFISDEVARD

SEQ ID NO: 26396 - protein, 16 aa, Severe acute respiratory syndrome-related coronavirus
  REGION 1..16: note = Table B: HLA-DRB1*08:02L
  source 1..16: note = Severe acute respiratory syndrome coronavirus 2
IIGYKAIDGGVTRDIA

SEQ ID NO: 26397 - protein, 13 aa, Severe acute respiratory syndrome-related coronavirus
  REGION 1..13: note = Table B: HLA-DRB1*08:02L
  source 1..13: note = Severe acute respiratory syndrome coronavirus 2
FGEYSHVVAFNTL

SEQ ID NO: 26398 - protein, 14 aa, Severe acute respiratory syndrome-related coronavirus
  REGION 1..14: note = Table B: HLA-DRB1*08:02L
  source 1..14: note = Severe acute respiratory syndrome coronavirus 2
LVYKVYYGNALDQA

SEQ ID NO: 26399 - protein, 16 aa, Severe acute respiratory syndrome-related coronavirus
  REGION 1..16: note = Table B: HLA-DRB1*08:02L
  source 1..16: note = Severe acute respiratory syndrome coronavirus 2
LSEISMDNSPNLAWPL

SEQ ID NO: 26400 - protein, 18 aa, Severe acute respiratory syndrome-related coronavirus
  REGION 1..18: note = Table B: HLA-DRB1*08:02L
  source 1..18: note = Severe acute respiratory syndrome coronavirus 2
DEDDNLIDSYFVVKRHTF

SEQ ID NO: 26401 - protein, 14 aa, Severe acute respiratory syndrome-related coronavirus
  REGION 1..14: note = Table B: HLA-DRB1*08:02L
  source 1..14: note = Severe acute respiratory syndrome coronavirus 2
ELLVYAADPAMHAA

SEQ ID NO: 26402 - protein, 15 aa, Severe acute respiratory syndrome-related coronavirus
  REGION 1..15: note = Table B: HLA-DRB1*08:02L
  source 1..15: note = Severe acute respiratory syndrome coronavirus 2
DDYVYLPYPDPSRIL

SEQ ID NO: 26403 - protein, 16 aa, Severe acute respiratory syndrome-related coronavirus
  REGION 1..16: note = Table B: HLA-DRB1*08:02L
  source 1..16: note = Severe acute respiratory syndrome coronavirus 2
NYVFTGYRVTKNSKVQ

SEQ ID NO: 26404 - protein, 15 aa, Severe acute respiratory syndrome-related coronavirus
  REGION 1..15: note = Table B: HLA-DRB1*08:02L
  source 1..15: note = Severe acute respiratory syndrome coronavirus 2
FTGYRVTKNSKVQIG

SEQ ID NO: 26405 - protein, 16 aa, Severe acute respiratory syndrome-related coronavirus
  REGION 1..16: note = Table B: HLA-DRB1*08:02L
  source 1..16: note = Severe acute respiratory syndrome coronavirus 2
TGYRVTKNSKVQIGEY

SEQ ID NO: 26406 - protein, 16 aa, Severe acute respiratory syndrome-related coronavirus
  REGION 1..16: note = Table B: HLA-DRB1*08:02L HLA-DRB1*08:03L
  source 1..16: note = Severe acute respiratory syndrome coronavirus 2
GYRVTKNSKVQIGEYT

SEQ ID NO: 26407 - protein, 15 aa, Severe acute respiratory syndrome-related coronavirus
  REGION 1..15: note = Table B: HLA-DRB1*08:02L
  source 1..15: note = Severe acute respiratory syndrome coronavirus 2
ITHDVSSAINRPQIG

SEQ ID NO: 26408 - protein, 15 aa, Severe acute respiratory syndrome-related coronavirus
  REGION 1..15: note = Table B: HLA-DRB1*08:02L
  source 1..15: note = Severe acute respiratory syndrome coronavirus 2
GDELKINAACRKVQH

SEQ ID NO: 26409 - protein, 18 aa, Severe acute respiratory syndrome-related coronavirus
  REGION 1..18: note = Table B: HLA-DRB1*08:02L
  source 1..18: note = Severe acute respiratory syndrome coronavirus 2
KVQHMVVKAALLADKFPV

SEQ ID NO: 26410 - protein, 17 aa, Severe acute respiratory syndrome-related coronavirus
  REGION 1..17: note = Table B: HLA-DRB1*08:02L
  source 1..17: note = Severe acute respiratory syndrome coronavirus 2
GLHLLIGLAKRFKESPF

SEQ ID NO: 26411 - protein, 18 aa, Severe acute respiratory syndrome-related coronavirus
  REGION 1..18: note = Table B: HLA-DRB1*08:02L
  source 1..18: note = Severe acute respiratory syndrome coronavirus 2
HVETFYPKLQSSQAWQPG

SEQ ID NO: 26412 - protein, 15 aa, Severe acute respiratory syndrome-related coronavirus
  REGION 1..15: note = Table B: HLA-DRB1*08:02L
  source 1..15: note = Severe acute respiratory syndrome coronavirus 2
SDMYDPKTKNVTKEN

SEQ ID NO: 26413 - protein, 17 aa, Severe acute respiratory syndrome-related coronavirus
  REGION 1..17: note = Table B: HLA-DRB1*08:02L
  source 1..17: note = Severe acute respiratory syndrome coronavirus 2
SEAFLIGCNYLGKPREQ

SEQ ID NO: 26414 - protein, 16 aa, Severe acute respiratory syndrome-related coronavirus
  REGION 1..16: note = Table B: HLA-DRB1*08:02L
  source 1..16: note = Severe acute respiratory syndrome coronavirus 2
KSWMESEFRVYSSANN

SEQ ID NO: 26415 - protein, 18 aa, Severe acute respiratory syndrome-related coronavirus
  REGION 1..18: note = Table B: HLA-DRB1*08:02L
  source 1..18: note = Severe acute respiratory syndrome coronavirus 2
LPIGINITRFQTLLALHR

SEQ ID NO: 26416 - protein, 14 aa, Severe acute respiratory syndrome-related coronavirus
  REGION 1..14: note = Table B: HLA-DRB1*08:02L
  source 1..14: note = Severe acute respiratory syndrome coronavirus 2
LKSFTVEKGIYQTS

SEQ ID NO: 26417 - protein, 15 aa, Severe acute respiratory syndrome-related coronavirus
  REGION 1..15: note = Table B: HLA-DRB1*08:02L
  source 1..15: note = Severe acute respiratory syndrome coronavirus 2
GGNYNYLYRLFRKSN

SEQ ID NO: 26418 - protein, 15 aa, Severe acute respiratory syndrome-related coronavirus
  REGION 1..15: note = Table B: HLA-DRB1*08:02L
  source 1..15: note = Severe acute respiratory syndrome coronavirus 2
VKQIYKTPPIKDFGG

SEQ ID NO: 26419 - protein, 13 aa, Severe acute respiratory syndrome-related coronavirus
  REGION 1..13: note = Table B: HLA-DRB1*08:02L
  source 1..13: note = Severe acute respiratory syndrome coronavirus 2
NFSQILPDPSKPS

SEQ ID NO: 26420 - protein, 15 aa, Severe acute respiratory syndrome-related coronavirus
  REGION 1..15: note = Table B: HLA-DRB1*08:02L
  source 1..15: note = Severe acute respiratory syndrome coronavirus 2
NTVYDPLQPELDSFK

SEQ ID NO: 26421 - protein, 13 aa, Severe acute respiratory syndrome-related coronavirus
  REGION 1..13: note = Table B: HLA-DRB1*08:02L
  source 1..13: note = Severe acute respiratory syndrome coronavirus 2
LAVFQSASKIITL

SEQ ID NO: 26422 - protein, 17 aa, Severe acute respiratory syndrome-related coronavirus
  REGION 1..17: note = Table B: HLA-DRB1*08:02L
  source 1..17: note = Severe acute respiratory syndrome coronavirus 2
GDQELIRQGTDYKHWPQ

SEQ ID NO: 26423 - protein, 13 aa, Severe acute respiratory syndrome-related coronavirus
  REGION 1..13: note = Table B: HLA-DRB1*08:03L
  source 1..13: note = Severe acute respiratory syndrome coronavirus 2
LLEILQKEKVNIN

SEQ ID NO: 26424 - protein, 12 aa, Severe acute respiratory syndrome-related coronavirus
  REGION 1..12: note = Table B: HLA-DRB1*08:03L
  source 1..12: note = Severe acute respiratory syndrome coronavirus 2
TVYEKLKPVLDW

SEQ ID NO: 26425 - protein, 15 aa, Severe acute respiratory syndrome-related coronavirus
  REGION 1..15: note = Table B: HLA-DRB1*08:03L
  source 1..15: note = Severe acute respiratory syndrome coronavirus 2
INGLMLLEIKDTEKY

SEQ ID NO: 26426 - protein, 15 aa, Severe acute respiratory syndrome-related coronavirus
  REGION 1..15: note = Table B: HLA-DRB1*08:03L
  source 1..15: note = Severe acute respiratory syndrome coronavirus 2
VQGYKSVNITFELDE

SEQ ID NO: 26427 - protein, 14 aa, Severe acute respiratory syndrome-related coronavirus
  REGION 1..14: note = Table B: HLA-DRB1*08:03L
  source 1..14: note = Severe acute respiratory syndrome coronavirus 2
QQIELKFNPPALQD

SEQ ID NO: 26428 - protein, 14 aa, Severe acute respiratory syndrome-related coronavirus
  REGION 1..14: note = Table B: HLA-DRB1*08:03L
  source 1..14: note = Severe acute respiratory syndrome coronavirus 2
QIELKFNPPALQDA

SEQ ID NO: 26429 - protein, 13 aa, Severe acute respiratory syndrome-related coronavirus
  REGION 1..13: note = Table B: HLA-DRB1*08:03L
  source 1..13: note = Severe acute respiratory syndrome coronavirus 2
NKTVGELGDVRET

SEQ ID NO: 26430 - protein, 13 aa, Severe acute respiratory syndrome-related coronavirus
  REGION 1..13: note = Table B: HLA-DRB1*08:03L
  source 1..13: note = Severe acute respiratory syndrome coronavirus 2
SDEVARDLSLQFK

SEQ ID NO: 26431 - protein, 15 aa, Severe acute respiratory syndrome-related coronavirus
  REGION 1..15: note = Table B: HLA-DRB1*08:03L
  source 1..15: note = Severe acute respiratory syndrome coronavirus 2
SIHLYFDKAGQKTYE

SEQ ID NO: 26432 - protein, 17 aa, Severe acute respiratory syndrome-related coronavirus
  REGION 1..17: note = Table B: HLA-DRB1*08:03L
  source 1..17: note = Severe acute respiratory syndrome coronavirus 2
TKDVVECLKLSHQSDIE

SEQ ID NO: 26433 - protein, 14 aa, Severe acute respiratory syndrome-related coronavirus
  REGION 1..14: note = Table B: HLA-DRB1*08:03L
  source 1..14: note = Severe acute respiratory syndrome coronavirus 2
TDTCFANKHADFDT

SEQ ID NO: 26434 - protein, 16 aa, Severe acute respiratory syndrome-related coronavirus
  REGION 1..16: note = Table B: HLA-DRB1*08:03L
  source 1..16: note = Severe acute respiratory syndrome coronavirus 2
DTCFANKHADFDTWFS

SEQ ID NO: 26435 - protein, 14 aa, Severe acute respiratory syndrome-related coronavirus
  REGION 1..14: note = Table B: HLA-DRB1*08:03L
  source 1..14: note = Severe acute respiratory syndrome coronavirus 2
FTMLRKLDNDALNN

SEQ ID NO: 26436 - protein, 15 aa, Severe acute respiratory syndrome-related coronavirus
  REGION 1..15: note = Table B: HLA-DRB1*08:03L
  source 1..15: note = Severe acute respiratory syndrome coronavirus 2
IAATRGATVVIGTSK

SEQ ID NO: 26437 - protein, 16 aa, Severe acute respiratory syndrome-related coronavirus
  REGION 1..16: note = Table B: HLA-DRB1*08:03L
  source 1..16: note = Severe acute respiratory syndrome coronavirus 2
GATVVIGTSKFYGGWH

SEQ ID NO: 26438 - protein, 16 aa, Severe acute respiratory syndrome-related coronavirus
  REGION 1..16: note = Table B: HLA-DRB1*08:03L
  source 1..16: note = Severe acute respiratory syndrome coronavirus 2
ATVVIGTSKFYGGWHN

SEQ ID NO: 26439 - protein, 17 aa, Severe acute respiratory syndrome-related coronavirus
  REGION 1..17: note = Table B: HLA-DRB1*08:03L
  source 1..17: note = Severe acute respiratory syndrome coronavirus 2
ATTAYANSVFNICQAVT

SEQ ID NO: 26440 - protein, 15 aa, Severe acute respiratory syndrome-related coronavirus
  REGION 1..15: note = Table B: HLA-DRB1*08:03L
  source 1..15: note = Severe acute respiratory syndrome coronavirus 2
ECLYRNRDVDTDFVN

SEQ ID NO: 26441 - protein, 15 aa, Severe acute respiratory syndrome-related coronavirus
  REGION 1..15: note = Table B: HLA-DRB1*08:03L
  source 1..15: note = Severe acute respiratory syndrome coronavirus 2
DVDTDFVNEFYAYLR

SEQ ID NO: 26442 - protein, 11 aa, Severe acute respiratory syndrome-related coronavirus
  REGION 1..11: note = Table B: HLA-DRB1*08:03L
  source 1..11: note = Severe acute respiratory syndrome coronavirus 2
YLQYIRKLHDE

SEQ ID NO: 26443 - protein, 15 aa, Severe acute respiratory syndrome-related coronavirus
  REGION 1..15: note = Table B: HLA-DRB1*08:03L
  source 1..15: note = Severe acute respiratory syndrome coronavirus 2
LEGYAFEHIVYGDFS

SEQ ID NO: 26444 - protein, 16 aa, Severe acute respiratory syndrome-related coronavirus
  REGION 1..16: note = Table B: HLA-DRB1*08:03L
  source 1..16: note = Severe acute respiratory syndrome coronavirus 2
VAIKITEHSWNADLYK

SEQ ID NO: 26445 - protein, 17 aa, Severe acute respiratory syndrome-related coronavirus
  REGION 1..17: note = Table B: HLA-DRB1*08:03L
  source 1..17: note = Severe acute respiratory syndrome coronavirus 2
GVYYHKNNKSWMESEFR

SEQ ID NO: 26446 - protein, 14 aa, Severe acute respiratory syndrome-related coronavirus
  REGION 1..14: note = Table B: HLA-DRB1*08:03L
  source 1..14: note = Severe acute respiratory syndrome coronavirus 2
VFNATRFASVYAWN

SEQ ID NO: 26447 - protein, 15 aa, Severe acute respiratory syndrome-related coronavirus
  REGION 1..15: note = Table B: HLA-DRB1*08:03L
  source 1..15: note = Severe acute respiratory syndrome coronavirus 2
GVLTESNKKFLPFQQ

SEQ ID NO: 26448 - protein, 13 aa, Severe acute respiratory syndrome-related coronavirus
  REGION 1..13: note = Table B: HLA-DRB1*08:03L
  source 1..13: note = Severe acute respiratory syndrome coronavirus 2
SYYKLGASQRVAG

SEQ ID NO: 26449 - protein, 16 aa, Severe acute respiratory syndrome-related coronavirus
  REGION 1..16: note = Table B: HLA-DRB1*08:03L
  source 1..16: note = Severe acute respiratory syndrome coronavirus 2
ASQRVAGDSGFAAYSR

SEQ ID NO: 26450 - protein, 11 aa, Severe acute respiratory syndrome-related coronavirus
  REGION 1..11: note = Table B: HLA-DQA1*02:01-B1*03:03L
  source 1..11: note = Severe acute respiratory syndrome coronavirus 2
SGETLGVLVPH

SEQ ID NO: 26451 - protein, 10 aa, Severe acute respiratory syndrome-related coronavirus
  REGION 1..10: note = Table B: HLA-DQA1*02:01-B1*03:03L
  source 1..10: note = Severe acute respiratory syndrome coronavirus 2
VFPLNSIIKT

SEQ ID NO: 26452 - protein, 12 aa, Severe acute respiratory syndrome-related coronavirus
  REGION 1..12: note = Table B: HLA-DQA1*02:01-B1*03:03L
  source 1..12: note = Severe acute respiratory syndrome coronavirus 2
GPEHSLAEYHNE

SEQ ID NO: 26453 - protein, 14 aa, Severe acute respiratory syndrome-related coronavirus
  REGION 1..14: note = Table B: HLA-DQA1*02:01-B1*03:03L
  source 1..14: note = Severe acute respiratory syndrome coronavirus 2
SEGLNDNLLEILQK

SEQ ID NO: 26454 - protein, 11 aa, Severe acute respiratory syndrome-related coronavirus
  REGION 1..11: note = Table B: HLA-DQA1*02:01-B1*03:03L HLA-DRB1*15:03L
  source 1..11: note = Severe acute respiratory syndrome coronavirus 2
NFKVTKGKAKK

SEQ ID NO: 26455 - protein, 11 aa, Severe acute respiratory syndrome-related coronavirus
  REGION 1..11: note = Table B: HLA-DQA1*02:01-B1*03:03L HLA-DRB1*15:03L
  source 1..11: note = Severe acute respiratory syndrome coronavirus 2
FKVTKGKAKKG

SEQ ID NO: 26456 - protein, 11 aa, Severe acute respiratory syndrome-related coronavirus
  REGION 1..11: note = Table B: HLA-DQA1*02:01-B1*03:03L
  source 1..11: note = Severe acute respiratory syndrome coronavirus 2
LEEKFKEGVEF

SEQ ID NO: 26457 - protein, 11 aa, Severe acute respiratory syndrome-related coronavirus
  REGION 1..11: note = Table B: HLA-DQA1*02:01-B1*03:03L
  source 1..11: note = Severe acute respiratory syndrome coronavirus 2
ALNLGETFVTH

SEQ ID NO: 26458 - protein, 11 aa, Severe acute respiratory syndrome-related coronavirus
  REGION 1..11: note = Table B: HLA-DQA1*02:01-B1*03:03L
  source 1..11: note = Severe acute respiratory syndrome coronavirus 2
TGLLMPLKAPK

SEQ ID NO: 26459 - protein, 13 aa, Severe acute respiratory syndrome-related coronavirus
  REGION 1..13: note = Table B: HLA-DQA1*02:01-B1*03:03L
  source 1..13: note = Severe acute respiratory syndrome coronavirus 2
SEAVEAPLVGTPV

SEQ ID NO: 26460 - protein, 11 aa, Severe acute respiratory syndrome-related coronavirus
  REGION 1..11: note = Table B: HLA-DQA1*02:01-B1*03:03L
  source 1..11: note = Severe acute respiratory syndrome coronavirus 2
EQKIAEIPKEE

SEQ ID NO: 26461 - protein, 14 aa, Severe acute respiratory syndrome-related coronavirus
  REGION 1..14: note = Table B: HLA-DQA1*02:01-B1*03:03L
  source 1..14: note = Severe acute respiratory syndrome coronavirus 2
RKVPTDNYITTYPG

SEQ ID NO: 26462 - protein, 13 aa, Severe acute respiratory syndrome-related coronavirus
  REGION 1..13: note = Table B: HLA-DQA1*02:01-B1*03:03L
  source 1..13: note = Severe acute respiratory syndrome coronavirus 2
RKYKGIKIQEGVV

SEQ ID NO: 26463 - protein, 15 aa, Severe acute respiratory syndrome-related coronavirus
  REGION 1..15: note = Table B: HLA-DQA1*02:01-B1*03:03L
  source 1..15: note = Severe acute respiratory syndrome coronavirus 2
LKRGDKSVYYTSNPT

SEQ ID NO: 26464 - protein, 10 aa, Severe acute respiratory syndrome-related coronavirus
  REGION 1..10: note = Table B: HLA-DQA1*02:01-B1*03:03L
  source 1..10: note = Severe acute respiratory syndrome coronavirus 2
PHNSHEGKTF

SEQ ID NO: 26465 - protein, 10 aa, Severe acute respiratory syndrome-related coronavirus
  REGION 1..10: note = Table B: HLA-DQA1*02:01-B1*03:03L
  source 1..10: note = Severe acute respiratory syndrome coronavirus 2
HNSHEGKTFY

SEQ ID NO: 26466 - protein, 10 aa, Severe acute respiratory syndrome-related coronavirus
  REGION 1..10: note = Table B: HLA-DQA1*02:01-B1*03:03L
  source 1..10: note = Severe acute respiratory syndrome coronavirus 2
MSALNHTKKW

SEQ ID NO: 26467 - protein, 12 aa, Severe acute respiratory syndrome-related coronavirus
  REGION 1..12: note = Table B: HLA-DQA1*02:01-B1*03:03L
  source 1..12: note = Severe acute respiratory syndrome coronavirus 2
SAPPAQYELKHG

SEQ ID NO: 26468 - protein, 12 aa, Severe acute respiratory syndrome-related coronavirus
  REGION 1..12: note = Table B: HLA-DQA1*02:01-B1*03:03L
  source 1..12: note = Severe acute respiratory syndrome coronavirus 2
TKSSEYKGPITD

SEQ ID NO: 26469 - protein, 10 aa, Severe acute respiratory syndrome-related coronavirus
  REGION 1..10: note = Table B: HLA-DQA1*02:01-B1*03:03L
  source 1..10: note = Severe acute respiratory syndrome coronavirus 2
GLAAVNSVPW

SEQ ID NO: 26470 - protein, 12 aa, Severe acute respiratory syndrome-related coronavirus
  REGION 1..12: note = Table B: HLA-DQA1*02:01-B1*03:03L
  source 1..12: note = Severe acute respiratory syndrome coronavirus 2
TTTNIVTRCLNR

SEQ ID NO: 26471 - protein, 10 aa, Severe acute respiratory syndrome-related coronavirus
  REGION 1..10: note = Table B: HLA-DQA1*02:01-B1*03:03L
  source 1..10: note = Severe acute respiratory syndrome coronavirus 2
KNTVKSVGKF

SEQ ID NO: 26472 - protein, 13 aa, Severe acute respiratory syndrome-related coronavirus
  REGION 1..13: note = Table B: HLA-DQA1*02:01-B1*03:03L
  source 1..13: note = Severe acute respiratory syndrome coronavirus 2
FDGKSKCEESSAK

SEQ ID NO: 26473 - protein, 16 aa, Severe acute respiratory syndrome-related coronavirus
  REGION 1..16: note = Table B: HLA-DQA1*02:01-B1*03:03L
  source 1..16: note = Severe acute respiratory syndrome coronavirus 2
DVETKDVVECLKLSHQ

SEQ ID NO: 26474 - protein, 12 aa, Severe acute respiratory syndrome-related coronavirus
  REGION 1..12: note = Table B: HLA-DQA1*02:01-B1*03:03L
  source 1..12: note = Severe acute respiratory syndrome coronavirus 2
DLGACIDCSARH

SEQ ID NO: 26475 - protein, 11 aa, Severe acute respiratory syndrome-related coronavirus
  REGION 1..11: note = Table B: HLA-DQA1*02:01-B1*03:03L
  source 1..11: note = Severe acute respiratory syndrome coronavirus 2
TRQVVNVVTTK

SEQ ID NO: 26476 - protein, 12 aa, Severe acute respiratory syndrome-related coronavirus
  REGION 1..12: note = Table B: HLA-DQA1*02:01-B1*03:03L
  source 1..12: note = Severe acute respiratory syndrome coronavirus 2
SQRGGSYTNDKA

SEQ ID NO: 26477 - protein, 10 aa, Severe acute respiratory syndrome-related coronavirus
  REGION 1..10: note = Table B: HLA-DQA1*02:01-B1*03:03L
  source 1..10: note = Severe acute respiratory syndrome coronavirus 2
PLIAAVITRE

SEQ ID NO: 26478 - protein, 12 aa, Severe acute respiratory syndrome-related coronavirus
  REGION 1..12: note = Table B: HLA-DQA1*02:01-B1*03:03L
  source 1..12: note = Severe acute respiratory syndrome coronavirus 2
REVGFVVPGLPG

SEQ ID NO: 26479 - protein, 11 aa, Severe acute respiratory syndrome-related coronavirus
  REGION 1..11: note = Table B: HLA-DQA1*02:01-B1*03:03L
  source 1..11: note = Severe acute respiratory syndrome coronavirus 2
DASGKPVPYCY

SEQ ID NO: 26480 - protein, 10 aa, Severe acute respiratory syndrome-related coronavirus
  REGION 1..10: note = Table B: HLA-DQA1*02:01-B1*03:03L
  source 1..10: note = Severe acute respiratory syndrome coronavirus 2
MRFRRAFGEY

SEQ ID NO: 26481 - protein, 13 aa, Severe acute respiratory syndrome-related coronavirus
  REGION 1..13: note = Table B: HLA-DQA1*02:01-B1*03:03L
  source 1..13: note = Severe acute respiratory syndrome coronavirus 2
TSEDMLNPNYEDL

SEQ ID NO: 26482 - protein, 11 aa, Severe acute respiratory syndrome-related coronavirus
  REGION 1..11: note = Table B: HLA-DQA1*02:01-B1*03:03L
  source 1..11: note = Severe acute respiratory syndrome coronavirus 2
NPNYEDLLIRK

SEQ ID NO: 26483 - protein, 11 aa, Severe acute respiratory syndrome-related coronavirus
  REGION 1..11: note = Table B: HLA-DQA1*02:01-B1*03:03L
  source 1..11: note = Severe acute respiratory syndrome coronavirus 2
MPASWVMRIMT

SEQ ID NO: 26484 - protein, 11 aa, Severe acute respiratory syndrome-related coronavirus
  REGION 1..11: note = Table B: HLA-DQA1*02:01-B1*03:03L
  source 1..11: note = Severe acute respiratory syndrome coronavirus 2
LLPPKNSIDAF

SEQ ID NO: 26485 - protein, 11 aa, Severe acute respiratory syndrome-related coronavirus
  REGION 1..11: note = Table B: HLA-DQA1*02:01-B1*03:03L
  source 1..11: note = Severe acute respiratory syndrome coronavirus 2
NSIDAFKLNIK

SEQ ID NO: 26486 - protein, 13 aa, Severe acute respiratory syndrome-related coronavirus
  REGION 1..13: note = Table B: HLA-DQA1*02:01-B1*03:03L
  source 1..13: note = Severe acute respiratory syndrome coronavirus 2
AIASEFSSLPSYA

SEQ ID NO: 26487 - protein, 13 aa, Severe acute respiratory syndrome-related coronavirus
  REGION 1..13: note = Table B: HLA-DQA1*02:01-B1*03:03L
  source 1..13: note = Severe acute respiratory syndrome coronavirus 2
SFLNRVCGVSAAR

SEQ ID NO: 26488 - protein, 15 aa, Severe acute respiratory syndrome-related coronavirus
  REGION 1..15: note = Table B: HLA-DQA1*02:01-B1*03:03L
  source 1..15: note = Severe acute respiratory syndrome coronavirus 2
ARLTPCGTGTSTDVV

SEQ ID NO: 26489 - protein, 16 aa, Severe acute respiratory syndrome-related coronavirus
  REGION 1..16: note = Table B: HLA-DQA1*02:01-B1*03:03L
  source 1..16: note = Severe acute respiratory syndrome coronavirus 2
VYALRHFDEGNCDTLK

SEQ ID NO: 26490 - protein, 15 aa, Severe acute respiratory syndrome-related coronavirus
  REGION 1..15: note = Table B: HLA-DQA1*02:01-B1*03:03L
  source 1..15: note = Severe acute respiratory syndrome coronavirus 2
ALRHFDEGNCDTLKE

SEQ ID NO: 26491 - protein, 11 aa, Severe acute respiratory syndrome-related coronavirus
  REGION 1..11: note = Table B: HLA-DQA1*02:01-B1*03:03L
  source 1..11: note = Severe acute respiratory syndrome coronavirus 2
FPPTSFGPLVR

SEQ ID NO: 26492 - protein, 10 aa, Severe acute respiratory syndrome-related coronavirus
  REGION 1..10: note = Table B: HLA-DQA1*02:01-B1*03:03L
  source 1..10: note = Severe acute respiratory syndrome coronavirus 2
VNLHSSRLSF

SEQ ID NO: 26493 - protein, 10 aa, Severe acute respiratory syndrome-related coronavirus
  REGION 1..10: note = Table B: HLA-DQA1*02:01-B1*03:03L
  source 1..10: note = Severe acute respiratory syndrome coronavirus 2
VKPGNFNKDF

SEQ ID NO: 26494 - protein, 13 aa, Severe acute respiratory syndrome-related coronavirus
  REGION 1..13: note = Table B: HLA-DQA1*02:01-B1*03:03L
  source 1..13: note = Severe acute respiratory syndrome coronavirus 2
VENPHLMGWDYPK

SEQ ID NO: 26495 - protein, 12 aa, Severe acute respiratory syndrome-related coronavirus
  REGION 1..12: note = Table B: HLA-DQA1*02:01-B1*03:03L
  source 1..12: note = Severe acute respiratory syndrome coronavirus 2
ADVFHLYLQYIR

SEQ ID NO: 26496 - protein, 10 aa, Severe acute respiratory syndrome-related coronavirus
  REGION 1..10: note = Table B: HLA-DQA1*02:01-B1*03:03L
  source 1..10: note = Severe acute respiratory syndrome coronavirus 2
NTSRYWEPEF

SEQ ID NO: 26497 - protein, 10 aa, Severe acute respiratory syndrome-related coronavirus
  REGION 1..10: note = Table B: HLA-DQA1*02:01-B1*03:03L
  source 1..10: note = Severe acute respiratory syndrome coronavirus 2
HVISTSHKLV

SEQ ID NO: 26498 - protein, 10 aa, Severe acute respiratory syndrome-related coronavirus
  REGION 1..10: note = Table B: HLA-DQA1*02:01-B1*03:03L
  source 1..10: note = Severe acute respiratory syndrome coronavirus 2
HKLVLSVNPY

SEQ ID NO: 26499 - protein, 11 aa, Severe acute respiratory syndrome-related coronavirus
  REGION 1..11: note = Table B: HLA-DQA1*02:01-B1*03:03L
  source 1..11: note = Severe acute respiratory syndrome coronavirus 2
FKLSYGIATVR

SEQ ID NO: 26500 - protein, 10 aa, Severe acute respiratory syndrome-related coronavirus
  REGION 1..10: note = Table B: HLA-DQA1*02:01-B1*03:03L
  source 1..10: note = Severe acute respiratory syndrome coronavirus 2
SKVQIGEYTF

SEQ ID NO: 26501 - protein, 11 aa, Severe acute respiratory syndrome-related coronavirus
  REGION 1..11: note = Table B: HLA-DQA1*02:01-B1*03:03L
  source 1..11: note = Severe acute respiratory syndrome coronavirus 2
LQGPPGTGKSH

SEQ ID NO: 26502 - protein, 11 aa, Severe acute respiratory syndrome-related coronavirus
  REGION 1..11: note = Table B: HLA-DQA1*02:01-B1*03:03L
  source 1..11: note = Severe acute respiratory syndrome coronavirus 2
SHAAVDALCEK

SEQ ID NO: 26503 - protein, 10 aa, Severe acute respiratory syndrome-related coronavirus
  REGION 1..10: note = Table B: HLA-DQA1*02:01-B1*03:03L
  source 1..10: note = Severe acute respiratory syndrome coronavirus 2
ARLRAKHYVY

SEQ ID NO: 26504 - protein, 13 aa, Severe acute respiratory syndrome-related coronavirus
  REGION 1..13: note = Table B: HLA-DQA1*02:01-B1*03:03L
  source 1..13: note = Severe acute respiratory syndrome coronavirus 2
NSVCRLMKTIGPD

SEQ ID NO: 26505 - protein, 11 aa, Severe acute respiratory syndrome-related coronavirus
  REGION 1..11: note = Table B: HLA-DQA1*02:01-B1*03:03L
  source 1..11: note = Severe acute respiratory syndrome coronavirus 2
PAEIVDTVSAL

SEQ ID NO: 26506 - protein, 10 aa, Severe acute respiratory syndrome-related coronavirus
  REGION 1..10: note = Table B: HLA-DQA1*02:01-B1*03:03L
  source 1..10: note = Severe acute respiratory syndrome coronavirus 2
RNPAWRKAVF

SEQ ID NO: 26507 - protein, 11 aa, Severe acute respiratory syndrome-related coronavirus
  REGION 1..11: note = Table B: HLA-DQA1*02:01-B1*03:03L
  source 1..11: note = Severe acute respiratory syndrome coronavirus 2
TAHSCNVNRFN

SEQ ID NO: 26508 - protein, 15 aa, Severe acute respiratory syndrome-related coronavirus
  REGION 1..15: note = Table B: HLA-DQA1*02:01-B1*03:03L
  source 1..15: note = Severe acute respiratory syndrome coronavirus 2
TRAKVGILCIMSDRD

SEQ ID NO: 26509 - protein, 15 aa, Severe acute respiratory syndrome-related coronavirus
  REGION 1..15: note = Table B: HLA-DQA1*02:01-B1*03:03L
  source 1..15: note = Severe acute respiratory syndrome coronavirus 2
FKTEGLCVDIPGIPK

SEQ ID NO: 26510 - protein, 11 aa, Severe acute respiratory syndrome-related coronavirus
  REGION 1..11: note = Table B: HLA-DQA1*02:01-B1*03:03L
  source 1..11: note = Severe acute respiratory syndrome coronavirus 2
VDTPNNTDFSR

SEQ ID NO: 26511 - protein, 10 aa, Severe acute respiratory syndrome-related coronavirus
  REGION 1..10: note = Table B: HLA-DQA1*02:01-B1*03:03L
  source 1..10: note = Severe acute respiratory syndrome coronavirus 2
LKNLSDRVVF

SEQ ID NO: 26512 - protein, 13 aa, Severe acute respiratory syndrome-related coronavirus
  REGION 1..13: note = Table B: HLA-DQA1*02:01-B1*03:03L
  source 1..13: note = Severe acute respiratory syndrome coronavirus 2
YPANSIVCRFDTR

SEQ ID NO: 26513 - protein, 10 aa, Severe acute respiratory syndrome-related coronavirus
  REGION 1..10: note = Table B: HLA-DQA1*02:01-B1*03:03L
  source 1..10: note = Severe acute respiratory syndrome coronavirus 2
AVCRHHANEY

SEQ ID NO: 26514 - protein, 11 aa, Severe acute respiratory syndrome-related coronavirus
  REGION 1..11: note = Table B: HLA-DQA1*02:01-B1*03:03L
  source 1..11: note = Severe acute respiratory syndrome coronavirus 2
QGEVPVSIINN

SEQ ID NO: 26515 - protein, 11 aa, Severe acute respiratory syndrome-related coronavirus
  REGION 1..11: note = Table B: HLA-DQA1*02:01-B1*03:03L
  source 1..11: note = Severe acute respiratory syndrome coronavirus 2
LQPSVGPKQAS

SEQ ID NO: 26516 - protein, 12 aa, Severe acute respiratory syndrome-related coronavirus
  REGION 1..12: note = Table B: HLA-DQA1*02:01-B1*03:03L
  source 1..12: note = Severe acute respiratory syndrome coronavirus 2
KKVDGVVQQLPE

SEQ ID NO: 26517 - protein, 12 aa, Severe acute respiratory syndrome-related coronavirus
  REGION 1..12: note = Table B: HLA-DQA1*02:01-B1*03:03L
  source 1..12: note = Severe acute respiratory syndrome coronavirus 2
TQSRNLQEFKPR

SEQ ID NO: 26518 - protein, 13 aa, Severe acute respiratory syndrome-related coronavirus
  REGION 1..13: note = Table B: HLA-DQA1*02:01-B1*03:03L
  source 1..13: note = Severe acute respiratory syndrome coronavirus 2
LLEKCDLQNYGDS

SEQ ID NO: 26519 - protein, 11 aa, Severe acute respiratory syndrome-related coronavirus
  REGION 1..11: note = Table B: HLA-DQA1*02:01-B1*03:03L
  source 1..11: note = Severe acute respiratory syndrome coronavirus 2
ATLPKGIMMNV

SEQ ID NO: 26520 - protein, 12 aa, Severe acute respiratory syndrome-related coronavirus
  REGION 1..12: note = Table B: HLA-DQA1*02:01-B1*03:03L
  source 1..12: note = Severe acute respiratory syndrome coronavirus 2
PKGIMMNVAKYT

SEQ ID NO: 26521 - protein, 10 aa, Severe acute respiratory syndrome-related coronavirus
  REGION 1..10: note = Table B: HLA-DQA1*02:01-B1*03:03L
  source 1..10: note = Severe acute respiratory syndrome coronavirus 2
TLAVPYNMRV

SEQ ID NO: 26522 - protein, 12 aa, Severe acute respiratory syndrome-related coronavirus
  REGION 1..12: note = Table B: HLA-DQA1*02:01-B1*03:03L
  source 1..12: note = Severe acute respiratory syndrome coronavirus 2
KENDSKEGFFTY

SEQ ID NO: 26523 - protein, 10 aa, Severe acute respiratory syndrome-related coronavirus
  REGION 1..10: note = Table B: HLA-DQA1*02:01-B1*03:03L
  source 1..10: note = Severe acute respiratory syndrome coronavirus 2
SFTRGVYYPD

SEQ ID NO: 26524 - protein, 11 aa, Severe acute respiratory syndrome-related coronavirus
  REGION 1..11: note = Table B: HLA-DQA1*02:01-B1*03:03L
  source 1..11: note = Severe acute respiratory syndrome coronavirus 2
IHVSGTNGTKR

SEQ ID NO: 26525 - protein, 10 aa, Severe acute respiratory syndrome-related coronavirus
  REGION 1..10: note = Table B: HLA-DQA1*02:01-B1*03:03L
  source 1..10: note = Severe acute respiratory syndrome coronavirus 2
VSGTNGTKRF

SEQ ID NO: 26526 - protein, 12 aa, Severe acute respiratory syndrome-related coronavirus
  REGION 1..12: note = Table B: HLA-DQA1*02:01-B1*03:03L HLA-DRB1*15:03L
  source 1..12: note = Severe acute respiratory syndrome coronavirus 2
TRFQTLLALHRS

SEQ ID NO: 26527 - protein, 11 aa, Severe acute respiratory syndrome-related coronavirus
  REGION 1..11: note = Table B: HLA-DQA1*02:01-B1*03:03L
  source 1..11: note = Severe acute respiratory syndrome coronavirus 2
TRFASVYAWNR

SEQ ID NO: 26528 - protein, 12 aa, Severe acute respiratory syndrome-related coronavirus
  REGION 1..12: note = Table B: HLA-DQA1*02:01-B1*03:03L
  source 1..12: note = Severe acute respiratory syndrome coronavirus 2
PVAIHADQLTPT

SEQ ID NO: 26529 - protein, 14 aa, Severe acute respiratory syndrome-related coronavirus
  REGION 1..14: note = Table B: HLA-DQA1*02:01-B1*03:03L
  source 1..14: note = Severe acute respiratory syndrome coronavirus 2
EHVNNSYECDIPIG

SEQ ID NO: 26530 - protein, 11 aa, Severe acute respiratory syndrome-related coronavirus
  REGION 1..11: note = Table B: HLA-DQA1*02:01-B1*03:03L
  source 1..11: note = Severe acute respiratory syndrome coronavirus 2
IGVTQNVLYEN

SEQ ID NO: 26531 - protein, 11 aa, Severe acute respiratory syndrome-related coronavirus
  REGION 1..11: note = Table B: HLA-DQA1*02:01-B1*03:03L
  source 1..11: note = Severe acute respiratory syndrome coronavirus 2
MSECVLGQSKR

SEQ ID NO: 26532 - protein, 11 aa, Severe acute respiratory syndrome-related coronavirus
  REGION 1..11: note = Table B: HLA-DQA1*02:01-B1*03:03L
  source 1..11: note = Severe acute respiratory syndrome coronavirus 2
RSMWSFNPETN

SEQ ID NO: 26533 - protein, 11 aa, Severe acute respiratory syndrome-related coronavirus
  REGION 1..11: note = Table B: HLA-DQA1*02:01-B1*03:03L
  source 1..11: note = Severe acute respiratory syndrome coronavirus 2
VPLHGTILTRP

SEQ ID NO: 26534 - protein, 10 aa, Severe acute respiratory syndrome-related coronavirus
  REGION 1..10: note = Table B: HLA-DQA1*02:01-B1*03:03L
  source 1..10: note = Severe acute respiratory syndrome coronavirus 2
AYSRYRIGNY

SEQ ID NO: 26535 - protein, 12 aa, Severe acute respiratory syndrome-related coronavirus
  REGION 1..12: note = Table B: HLA-DQA1*02:01-B1*03:03L
  source 1..12: note = Severe acute respiratory syndrome coronavirus 2
STGSNQNGERSG

SEQ ID NO: 26536 - protein, 10 aa, Severe acute respiratory syndrome-related coronavirus
  REGION 1..10: note = Table B: HLA-DQA1*02:01-B1*03:03L
  source 1..10: note = Severe acute respiratory syndrome coronavirus 2
GKMKDLSPRW

SEQ ID NO: 26537 - protein, 12 aa, Severe acute respiratory syndrome-related coronavirus
  REGION 1..12: note = Table B: HLA-DQA1*02:01-B1*03:03L
  source 1..12: note = Severe acute respiratory syndrome coronavirus 2
TLPKGFYAEGSR

SEQ ID NO: 26538 - protein, 12 aa, Severe acute respiratory syndrome-related coronavirus
  REGION 1..12: note = Table B: HLA-DQA1*02:01-B1*03:03L
  source 1..12: note = Severe acute respiratory syndrome coronavirus 2
LPKGFYAEGSRG

SEQ ID NO: 26539 - protein, 12 aa, Severe acute respiratory syndrome-related coronavirus
  REGION 1..12: note = Table B: HLA-DQA1*02:01-B1*03:03L
  source 1..12: note = Severe acute respiratory syndrome coronavirus 2
GSQASSRSSSRS

SEQ ID NO: 26540 - protein, 12 aa, Severe acute respiratory syndrome-related coronavirus
  REGION 1..12: note = Table B: HLA-DQA1*02:01-B1*03:03L
  source 1..12: note = Severe acute respiratory syndrome coronavirus 2
GTSPARMAGNGG

SEQ ID NO: 26541 - protein, 10 aa, Severe acute respiratory syndrome-related coronavirus
  REGION 1..10: note = Table B: HLA-DQA1*02:01-B1*03:03L
  source 1..10: note = Severe acute respiratory syndrome coronavirus 2
RTATKAYNVT

SEQ ID NO: 26542 - protein, 11 aa, Severe acute respiratory syndrome-related coronavirus
  REGION 1..11: note = Table B: HLA-DQA1*02:01-B1*03:03L
  source 1..11: note = Severe acute respiratory syndrome coronavirus 2
ATKAYNVTQAF

SEQ ID NO: 26543 - protein, 13 aa, Severe acute respiratory syndrome-related coronavirus
  REGION 1..13: note = Table B: HLA-DQA1*02:01-B1*03:03L
  source 1..13: note = Severe acute respiratory syndrome coronavirus 2
RGPEQTQGNFGDQ

SEQ ID NO: 26544 - protein, 10 aa, Severe acute respiratory syndrome-related coronavirus
  REGION 1..10: note = Table B: HLA-DQA1*02:01-B1*03:03L
  source 1..10: note = Severe acute respiratory syndrome coronavirus 2
IKLDDKDPNF

SEQ ID NO: 26545 - protein, 15 aa, Severe acute respiratory syndrome-related coronavirus
  REGION 1..15: note = Table B: HLA-DRB1*15:01L
  source 1..15: note = Severe acute respiratory syndrome coronavirus 2
ITGGVVQLTSQWLTN

SEQ ID NO: 26546 - protein, 15 aa, Severe acute respiratory syndrome-related coronavirus
  REGION 1..15: note = Table B: HLA-DRB1*15:01L
  source 1..15: note = Severe acute respiratory syndrome coronavirus 2
VKPTVVVNAANVYLK

SEQ ID NO: 26547 - protein, 16 aa, Severe acute respiratory syndrome-related coronavirus
  REGION 1..16: note = Table B: HLA-DRB1*15:01L
  source 1..16: note = Severe acute respiratory syndrome coronavirus 2
VAGALNKATNNAMQVE

SEQ ID NO: 26548 - protein, 15 aa, Severe acute respiratory syndrome-related coronavirus
  REGION 1..15: note = Table B: HLA-DRB1*15:01L
  source 1..15: note = Severe acute respiratory syndrome coronavirus 2
VSSFLEMKSEKQVEQ

SEQ ID NO: 26549 - protein, 14 aa, Severe acute respiratory syndrome-related coronavirus
  REGION 1..14: note = Table B: HLA-DRB1*15:01L
  source 1..14: note = Severe acute respiratory syndrome coronavirus 2
QLFFSYFAVHFISN

SEQ ID NO: 26550 - protein, 14 aa, Severe acute respiratory syndrome-related coronavirus
  REGION 1..14: note = Table B: HLA-DRB1*15:01L
  source 1..14: note = Severe acute respiratory syndrome coronavirus 2
EVAVKMFDAYVNTF

SEQ ID NO: 26551 - protein, 16 aa, Severe acute respiratory syndrome-related coronavirus
  REGION 1..16: note = Table B: HLA-DRB1*15:01L
  source 1..16: note = Severe acute respiratory syndrome coronavirus 2
VAAIFYLITPVHVMSK

SEQ ID NO: 26552 - protein, 15 aa, Severe acute respiratory syndrome-related coronavirus
  REGION 1..15: note = Table B: HLA-DRB1*15:01L
  source 1..15: note = Severe acute respiratory syndrome coronavirus 2
TPVYSFLPGVYSVIY

SEQ ID NO: 26553 - protein, 14 aa, Severe acute respiratory syndrome-related coronavirus
  REGION 1..14: note = Table B: HLA-DRB1*15:01L
  source 1..14: note = Severe acute respiratory syndrome coronavirus 2
SDVLLPLTQYNRYL

SEQ ID NO: 26554 - protein, 16 aa, Severe acute respiratory syndrome-related coronavirus
  REGION 1..16: note = Table B: HLA-DRB1*15:01L
  source 1..16: note = Severe acute respiratory syndrome coronavirus 2
VVLLILMTARTVYDDG

SEQ ID NO: 26555 - protein, 16 aa, Severe acute respiratory syndrome-related coronavirus
  REGION 1..16: note = Table B: HLA-DRB1*15:01L
  source 1..16: note = Severe acute respiratory syndrome coronavirus 2
AAKAYKDYLASGGQPI

SEQ ID NO: 26556 - protein, 15 aa, Severe acute respiratory syndrome-related coronavirus
  REGION 1..15: note = Table B: HLA-DRB1*15:01L
  source 1..15: note = Severe acute respiratory syndrome coronavirus 2
DFYDFAVSKGFFKEG

SEQ ID NO: 26557 - protein, 16 aa, Severe acute respiratory syndrome-related coronavirus
  REGION 1..16: note = Table B: HLA-DRB1*15:01L
  source 1..16: note = Severe acute respiratory syndrome coronavirus 2
YDYYRYNLPTMCDIRQ

SEQ ID NO: 26558 - protein, 13 aa, Severe acute respiratory syndrome-related coronavirus
  REGION 1..13: note = Table B: HLA-DRB1*15:01L
  source 1..13: note = Severe acute respiratory syndrome coronavirus 2
VASIKNFKSVLYY

SEQ ID NO: 26559 - protein, 16 aa, Severe acute respiratory syndrome-related coronavirus
  REGION 1..16: note = Table B: HLA-DRB1*15:01L
  source 1..16: note = Severe acute respiratory syndrome coronavirus 2
PAEIVDTVSALVYDNK

SEQ ID NO: 26560 - protein, 13 aa, Severe acute respiratory syndrome-related coronavirus
  REGION 1..13: note = Table B: HLA-DRB1*15:01L
  source 1..13: note = Severe acute respiratory syndrome coronavirus 2
ANEYRLYLDAYNM

SEQ ID NO: 26561 - protein, 16 aa, Severe acute respiratory syndrome-related coronavirus
  REGION 1..16: note = Table B: HLA-DRB1*15:01L
  source 1..16: note = Severe acute respiratory syndrome coronavirus 2
PVPEVKILNNLGVDIA

SEQ ID NO: 26562 - protein, 15 aa, Severe acute respiratory syndrome-related coronavirus
  REGION 1..15: note = Table B: HLA-DRB1*15:01L
  source 1..15: note = Severe acute respiratory syndrome coronavirus 2
DDFVEIIKSQDLSVV

SEQ ID NO: 26563 - protein, 14 aa, Severe acute respiratory syndrome-related coronavirus
  REGION 1..14: note = Table B: HLA-DRB1*15:01L
  source 1..14: note = Severe acute respiratory syndrome coronavirus 2
GAAAYYVGYLQPRT

SEQ ID NO: 26564 - protein, 15 aa, Severe acute respiratory syndrome-related coronavirus
  REGION 1..15: note = Table B: HLA-DRB1*15:01L
  source 1..15: note = Severe acute respiratory syndrome coronavirus 2
DYSVLYNSASFSTFK

SEQ ID NO: 26565 - protein, 13 aa, Severe acute respiratory syndrome-related coronavirus
  REGION 1..13: note = Table B: HLA-DRB1*15:01L
  source 1..13: note = Severe acute respiratory syndrome coronavirus 2
ASYQTQTNSPRRA

SEQ ID NO: 26566 - protein, 14 aa, Severe acute respiratory syndrome-related coronavirus
  REGION 1..14: note = Table B: HLA-DRB1*15:01L
  source 1..14: note = Severe acute respiratory syndrome coronavirus 2
DVVIGIVNNTVYDP

SEQ ID NO: 26567 - protein, 15 aa, Severe acute respiratory syndrome-related coronavirus
  REGION 1..15: note = Table B: HLA-DRB1*15:01L
  source 1..15: note = Severe acute respiratory syndrome coronavirus 2
VALLAVFQSASKIIT

SEQ ID NO: 26568 - protein, 15 aa, Severe acute respiratory syndrome-related coronavirus
  REGION 1..15: note = Table B: HLA-DRB1*15:01L
  source 1..15: note = Severe acute respiratory syndrome coronavirus 2
KHIDAYKTFPPTEPK

SEQ ID NO: 26569 - protein, 13 aa, Severe acute respiratory syndrome-related coronavirus
  REGION 1..13: note = Table B: HLA-DRB1*15:03L
  source 1..13: note = Severe acute respiratory syndrome coronavirus 2
SLVPGFNEKTHVQ

SEQ ID NO: 26570 - protein, 15 aa, Severe acute respiratory syndrome-related coronavirus
  REGION 1..15: note = Table B: HLA-DRB1*15:03L
  source 1..15: note = Severe acute respiratory syndrome coronavirus 2
QPYVFIKRSDARTAP

SEQ ID NO: 26571 - protein, 14 aa, Severe acute respiratory syndrome-related coronavirus
  REGION 1..14: note = Table B: HLA-DRB1*15:03L
  source 1..14: note = Severe acute respiratory syndrome coronavirus 2
HVMVELVAELEGIQ

SEQ ID NO: 26572 - protein, 16 aa, Severe acute respiratory syndrome-related coronavirus
  REGION 1..16: note = Table B: HLA-DRB1*15:03L
  source 1..16: note = Severe acute respiratory syndrome coronavirus 2
ADLKSFDLGDELGTDP

SEQ ID NO: 26573 - protein, 13 aa, Severe acute respiratory syndrome-related coronavirus
  REGION 1..13: note = Table B: HLA-DRB1*15:03L
  source 1..13: note = Severe acute respiratory syndrome coronavirus 2
KKKLDGFMGRIRS

SEQ ID NO: 26574 - protein, 12 aa, Severe acute respiratory syndrome-related coronavirus
  REGION 1..12: note = Table B: HLA-DRB1*15:03L
  source 1..12: note = Severe acute respiratory syndrome coronavirus 2
HSLAEYHNESGL

SEQ ID NO: 26575 - protein, 16 aa, Severe acute respiratory syndrome-related coronavirus
  REGION 1..16: note = Table B: HLA-DRB1*15:03L
  source 1..16: note = Severe acute respiratory syndrome coronavirus 2
VFSYVGCHNKCAYWVP

SEQ ID NO: 26576 - protein, 13 aa, Severe acute respiratory syndrome-related coronavirus
  REGION 1..13: note = Table B: HLA-DRB1*15:03L
  source 1..13: note = Severe acute respiratory syndrome coronavirus 2
EILQKEKVNINIV

SEQ ID NO: 26577 - protein, 11 aa, Severe acute respiratory syndrome-related coronavirus
  REGION 1..11: note = Table B: HLA-DRB1*15:03L
  source 1..11: note = Severe acute respiratory syndrome coronavirus 2
VNINIVGDFKL

SEQ ID NO: 26578 - protein, 11 aa, Severe acute respiratory syndrome-related coronavirus
  REGION 1..11: note = Table B: HLA-DRB1*15:03L
  source 1..11: note = Severe acute respiratory syndrome coronavirus 2
DFKLNEEIAII

SEQ ID NO: 26579 - protein, 12 aa, Severe acute respiratory syndrome-related coronavirus
  REGION 1..12: note = Table B: HLA-DRB1*15:03L
  source 1..12: note = Severe acute respiratory syndrome coronavirus 2
GISQYSLRLIDA

SEQ ID NO: 26580 - protein, 12 aa, Severe acute respiratory syndrome-related coronavirus
  REGION 1..12: note = Table B: HLA-DRB1*15:03L
  source 1..12: note = Severe acute respiratory syndrome coronavirus 2
EIVKFISTCACE

SEQ ID NO: 26581 - protein, 13 aa, Severe acute respiratory syndrome-related coronavirus
  REGION 1..13: note = Table B: HLA-DRB1*15:03L
  source 1..13: note = Severe acute respiratory syndrome coronavirus 2
KFLALCADSIIIG

SEQ ID NO: 26582 - protein, 12 aa, Severe acute respiratory syndrome-related coronavirus
  REGION 1..12: note = Table B: HLA-DRB1*15:03L
  source 1..12: note = Severe acute respiratory syndrome coronavirus 2
AKLKALNLGETF

SEQ ID NO: 26583 - protein, 12 aa, Severe acute respiratory syndrome-related coronavirus
  REGION 1..12: note = Table B: HLA-DRB1*15:03L
  source 1..12: note = Severe acute respiratory syndrome coronavirus 2
KEIIFLEGETLP

SEQ ID NO: 26584 - protein, 16 aa, Severe acute respiratory syndrome-related coronavirus
  REGION 1..16: note = Table B: HLA-DRB1*15:03L
  source 1..16: note = Severe acute respiratory syndrome coronavirus 2
TPVCINGLMLLEIKDT

SEQ ID NO: 26585 - protein, 12 aa, Severe acute respiratory syndrome-related coronavirus
  REGION 1..12: note = Table B: HLA-DRB1*15:03L
  source 1..12: note = Severe acute respiratory syndrome coronavirus 2
MVTNNTFTLKGG

SEQ ID NO: 26586 - protein, 11 aa, Severe acute respiratory syndrome-related coronavirus
  REGION 1..11: note = Table B: HLA-DRB1*15:03L
  source 1..11: note = Severe acute respiratory syndrome coronavirus 2
DEWSMATYYLF

SEQ ID NO: 26587 - protein, 15 aa, Severe acute respiratory syndrome-related coronavirus
  REGION 1..15: note = Table B: HLA-DRB1*15:03L
  source 1..15: note = Severe acute respiratory syndrome coronavirus 2
SAALQPEEEQEEDWL

SEQ ID NO: 26588 - protein, 12 aa, Severe acute respiratory syndrome-related coronavirus
  REGION 1..12: note = Table B: HLA-DRB1*15:03L
  source 1..12: note = Severe acute respiratory syndrome coronavirus 2
VYLKHGGGVAGA

SEQ ID NO: 26589 - protein, 12 aa, Severe acute respiratory syndrome-related coronavirus
  REGION 1..12: note = Table B: HLA-DRB1*15:03L
  source 1..12: note = Severe acute respiratory syndrome coronavirus 2
VLLAPLLSAGIF

SEQ ID NO: 26590 - protein, 14 aa, Severe acute respiratory syndrome-related coronavirus
  REGION 1..14: note = Table B: HLA-DRB1*15:03L
  source 1..14: note = Severe acute respiratory syndrome coronavirus 2
TVLKKCKSAFYILP

SEQ ID NO: 26591 - protein, 13 aa, Severe acute respiratory syndrome-related coronavirus
  REGION 1..13: note = Table B: HLA-DRB1*15:03L
  source 1..13: note = Severe acute respiratory syndrome coronavirus 2
ILPSIISNEKQEI

SEQ ID NO: 26592 - protein, 14 aa, Severe acute respiratory syndrome-related coronavirus
  REGION 1..14: note = Table B: HLA-DRB1*15:03L
  source 1..14: note = Severe acute respiratory syndrome coronavirus 2
WNLREMLAHAEETR

SEQ ID NO: 26593 - protein, 16 aa, Severe acute respiratory syndrome-related coronavirus
  REGION 1..16: note = Table B: HLA-DRB1*15:03L
  source 1..16: note = Severe acute respiratory syndrome coronavirus 2
TRKLMPVCVETKAIVS

SEQ ID NO: 26594 - protein, 12 aa, Severe acute respiratory syndrome-related coronavirus
  REGION 1..12: note = Table B: HLA-DRB1*15:03L
  source 1..12: note = Severe acute respiratory syndrome coronavirus 2
DAVTAYNGYLTS

SEQ ID NO: 26595 - protein, 13 aa, Severe acute respiratory syndrome-related coronavirus
  REGION 1..13: note = Table B: HLA-DRB1*15:03L
  source 1..13: note = Severe acute respiratory syndrome coronavirus 2
FLGRYMSALNHTK

SEQ ID NO: 26596 - protein, 12 aa, Severe acute respiratory syndrome-related coronavirus
  REGION 1..12: note = Table B: HLA-DRB1*15:03L
  source 1..12: note = Severe acute respiratory syndrome coronavirus 2
TLYCIDGALLTK

SEQ ID NO: 26597 - protein, 14 aa, Severe acute respiratory syndrome-related coronavirus
  REGION 1..14: note = Table B: HLA-DRB1*15:03L
  source 1..14: note = Severe acute respiratory syndrome coronavirus 2
LYCIDGALLTKSSE

SEQ ID NO: 26598 - protein, 14 aa, Severe acute respiratory syndrome-related coronavirus
  REGION 1..14: note = Table B: HLA-DRB1*15:03L
  source 1..14: note = Severe acute respiratory syndrome coronavirus 2
KPNELSRVLGLKTL

SEQ ID NO: 26599 - protein, 14 aa, Severe acute respiratory syndrome-related coronavirus
  REGION 1..14: note = Table B: HLA-DRB1*15:03L
  source 1..14: note = Severe acute respiratory syndrome coronavirus 2
NIVTRCLNRVCTNY

SEQ ID NO: 26600 - protein, 10 aa, Severe acute respiratory syndrome-related coronavirus
  REGION 1..10: note = Table B: HLA-DRB1*15:03L
  source 1..10: note = Severe acute respiratory syndrome coronavirus 2
SKLINIIIWF

SEQ ID NO: 26601 - protein, 14 aa, Severe acute respiratory syndrome-related coronavirus
  REGION 1..14: note = Table B: HLA-DRB1*15:03L
  source 1..14: note = Severe acute respiratory syndrome coronavirus 2
MPSYCTGYREGYLN

SEQ ID NO: 26602 - protein, 11 aa, Severe acute respiratory syndrome-related coronavirus
  REGION 1..11: note = Table B: HLA-DRB1*15:03L
  source 1..11: note = Severe acute respiratory syndrome coronavirus 2
RMYIFFASFYY

SEQ ID NO: 26603 - protein, 12 aa, Severe acute respiratory syndrome-related coronavirus
  REGION 1..12: note = Table B: HLA-DRB1*15:03L
  source 1..12: note = Severe acute respiratory syndrome coronavirus 2
YIFFASFYYVWK

SEQ ID NO: 26604 - protein, 13 aa, Severe acute respiratory syndrome-related coronavirus
  REGION 1..13: note = Table B: HLA-DRB1*15:03L
  source 1..13: note = Severe acute respiratory syndrome coronavirus 2
IFFASFYYVWKSY

SEQ ID NO: 26605 - protein, 14 aa, Severe acute respiratory syndrome-related coronavirus
  REGION 1..14: note = Table B: HLA-DRB1*15:03L
  source 1..14: note = Severe acute respiratory syndrome coronavirus 2
VHVVDGCNSSTCMM

SEQ ID NO: 26606 - protein, 15 aa, Severe acute respiratory syndrome-related coronavirus
  REGION 1..15: note = Table B: HLA-DRB1*15:03L
  source 1..15: note = Severe acute respiratory syndrome coronavirus 2
GFCKLHNWNCVNCDT

SEQ ID NO: 26607 - protein, 14 aa, Severe acute respiratory syndrome-related coronavirus
  REGION 1..14: note = Table B: HLA-DRB1*15:03L
  source 1..14: note = Severe acute respiratory syndrome coronavirus 2
SLQFKRPINPTDQS

SEQ ID NO: 26608 - protein, 12 aa, Severe acute respiratory syndrome-related coronavirus
  REGION 1..12: note = Table B: HLA-DRB1*15:03L
  source 1..12: note = Severe acute respiratory syndrome coronavirus 2
TLVATAEAELAK

SEQ ID NO: 26609 - protein, 14 aa, Severe acute respiratory syndrome-related coronavirus
  REGION 1..14: note = Table B: HLA-DRB1*15:03L
  source 1..14: note = Severe acute respiratory syndrome coronavirus 2
RQGFVDSDVETKDV

SEQ ID NO: 26610 - protein, 15 aa, Severe acute respiratory syndrome-related coronavirus
  REGION 1..15: note = Table B: HLA-DRB1*15:03L
  source 1..15: note = Severe acute respiratory syndrome coronavirus 2
GDSCNNYMLTYNKVE

SEQ ID NO: 26611 - protein, 10 aa, Severe acute respiratory syndrome-related coronavirus
  REGION 1..10: note = Table B: HLA-DRB1*15:03L
  source 1..10: note = Severe acute respiratory syndrome coronavirus 2
ALIWNVKDFM

SEQ ID NO: 26612 - protein, 10 aa, Severe acute respiratory syndrome-related coronavirus
  REGION 1..10: note = Table B: HLA-DRB1*15:03L
  source 1..10: note = Severe acute respiratory syndrome coronavirus 2
QLIKVTLVFL

SEQ ID NO: 26613 - protein, 11 aa, Severe acute respiratory syndrome-related coronavirus
  REGION 1..11: note = Table B: HLA-DRB1*15:03L
  source 1..11: note = Severe acute respiratory syndrome coronavirus 2
EIIGYKAIDGG

SEQ ID NO: 26614 - protein, 17 aa, Severe acute respiratory syndrome-related coronavirus
  REGION 1..17: note = Table B: HLA-DRB1*15:03L
  source 1..17: note = Severe acute respiratory syndrome coronavirus 2
DIASTDTCFANKHADFD

SEQ ID NO: 26615 - protein, 10 aa, Severe acute respiratory syndrome-related coronavirus
  REGION 1..10: note = Table B: HLA-DRB1*15:03L
  source 1..10: note = Severe acute respiratory syndrome coronavirus 2
SYTNDKACPL

SEQ ID NO: 26616 - protein, 15 aa, Severe acute respiratory syndrome-related coronavirus
  REGION 1..15: note = Table B: HLA-DRB1*15:03L
  source 1..15: note = Severe acute respiratory syndrome coronavirus 2
NDKACPLIAAVITRE

SEQ ID NO: 26617 - protein, 13 aa, Severe acute respiratory syndrome-related coronavirus
  REGION 1..13: note = Table B: HLA-DRB1*15:03L
  source 1..13: note = Severe acute respiratory syndrome coronavirus 2
AVGNICYTPSKLI

SEQ ID NO: 26618 - protein, 12 aa, Severe acute respiratory syndrome-related coronavirus
  REGION 1..12: note = Table B: HLA-DRB1*15:03L
  source 1..12: note = Severe acute respiratory syndrome coronavirus 2
VNLLTNMFTPLI

SEQ ID NO: 26619 - protein, 13 aa, Severe acute respiratory syndrome-related coronavirus
  REGION 1..13: note = Table B: HLA-DRB1*15:03L
  source 1..13: note = Severe acute respiratory syndrome coronavirus 2
GIVAIVVTCLAYY

SEQ ID NO: 26620 - protein, 10 aa, Severe acute respiratory syndrome-related coronavirus
  REGION 1..10: note = Table B: HLA-DRB1*15:03L
  source 1..10: note = Severe acute respiratory syndrome coronavirus 2
VVAFNTLLFL

SEQ ID NO: 26621 - protein, 14 aa, Severe acute respiratory syndrome-related coronavirus
  REGION 1..14: note = Table B: HLA-DRB1*15:03L
  source 1..14: note = Severe acute respiratory syndrome coronavirus 2
SVIYLYLTFYLTND

SEQ ID NO: 26622 - protein, 11 aa, Severe acute respiratory syndrome-related coronavirus
  REGION 1..11: note = Table B: HLA-DRB1*15:03L
  source 1..11: note = Severe acute respiratory syndrome coronavirus 2
LTNDVSFLAHI

SEQ ID NO: 26623 - protein, 12 aa, Severe acute respiratory syndrome-related coronavirus
  REGION 1..12: note = Table B: HLA-DRB1*15:03L
  source 1..12: note = Severe acute respiratory syndrome coronavirus 2
WFFSNYLKRRVV

SEQ ID NO: 26624 - protein, 12 aa, Severe acute respiratory syndrome-related coronavirus
  REGION 1..12: note = Table B: HLA-DRB1*15:03L
  source 1..12: note = Severe acute respiratory syndrome coronavirus 2
ALCTFLLNKEMY

SEQ ID NO: 26625 - protein, 16 aa, Severe acute respiratory syndrome-related coronavirus
  REGION 1..16: note = Table B: HLA-DRB1*15:03L
  source 1..16: note = Severe acute respiratory syndrome coronavirus 2
VSFCYMHHMELPTGVH

SEQ ID NO: 26626 - protein, 12 aa, Severe acute respiratory syndrome-related coronavirus
  REGION 1..12: note = Table B: HLA-DRB1*15:03L
  source 1..12: note = Severe acute respiratory syndrome coronavirus 2
NVLAWLYAAVIN

SEQ ID NO: 26627 - protein, 14 aa, Severe acute respiratory syndrome-related coronavirus
  REGION 1..14: note = Table B: HLA-DRB1*15:03L
  source 1..14: note = Severe acute respiratory syndrome coronavirus 2
LKELLQNGMNGRTI

SEQ ID NO: 26628 - protein, 14 aa, Severe acute respiratory syndrome-related coronavirus
  REGION 1..14: note = Table B: HLA-DRB1*15:03L
  source 1..14: note = Severe acute respiratory syndrome coronavirus 2
IAMSAFAMMFVKHK

SEQ ID NO: 26629 - protein, 13 aa, Severe acute respiratory syndrome-related coronavirus
  REGION 1..13: note = Table B: HLA-DRB1*15:03L
  source 1..13: note = Severe acute respiratory syndrome coronavirus 2
LKDCVMYASAVVL

SEQ ID NO: 26630 - protein, 10 aa, Severe acute respiratory syndrome-related coronavirus
  REGION 1..10: note = Table B: HLA-DRB1*15:03L
  source 1..10: note = Severe acute respiratory syndrome coronavirus 2
VMYASAVVLL

SEQ ID NO: 26631 - protein, 11 aa, Severe acute respiratory syndrome-related coronavirus
  REGION 1..11: note = Table B: HLA-DRB1*15:03L
  source 1..11: note = Severe acute respiratory syndrome coronavirus 2
CPIFFITGNTL

SEQ ID NO: 26632 - protein, 12 aa, Severe acute respiratory syndrome-related coronavirus
  REGION 1..12: note = Table B: HLA-DRB1*15:03L
  source 1..12: note = Severe acute respiratory syndrome coronavirus 2
FGLFCLLNRYFR

SEQ ID NO: 26633 - protein, 15 aa, Severe acute respiratory syndrome-related coronavirus
  REGION 1..15: note = Table B: HLA-DRB1*15:03L
  source 1..15: note = Severe acute respiratory syndrome coronavirus 2
GKPCIKVATVQSKMS

SEQ ID NO: 26634 - protein, 12 aa, Severe acute respiratory syndrome-related coronavirus
  REGION 1..12: note = Table B: HLA-DRB1*15:03L
  source 1..12: note = Severe acute respiratory syndrome coronavirus 2
LLSMQGAVDINK

SEQ ID NO: 26635 - protein, 12 aa, Severe acute respiratory syndrome-related coronavirus
  REGION 1..12: note = Table B: HLA-DRB1*15:03L
  source 1..12: note = Severe acute respiratory syndrome coronavirus 2
AVDINKLCEEML

SEQ ID NO: 26636 - protein, 12 aa, Severe acute respiratory syndrome-related coronavirus
  REGION 1..12: note = Table B: HLA-DRB1*15:03L
  source 1..12: note = Severe acute respiratory syndrome coronavirus 2
VDINKLCEEMLD

SEQ ID NO: 26637 - protein, 12 aa, Severe acute respiratory syndrome-related coronavirus
  REGION 1..12: note = Table B: HLA-DRB1*15:03L
  source 1..12: note = Severe acute respiratory syndrome coronavirus 2
MYKQARSEDKRA

SEQ ID NO: 26638 - protein, 14 aa, Severe acute respiratory syndrome-related coronavirus
  REGION 1..14: note = Table B: HLA-DRB1*15:03L
  source 1..14: note = Severe acute respiratory syndrome coronavirus 2
AMQTMLFTMLRKLD

SEQ ID NO: 26639 - protein, 14 aa, Severe acute respiratory syndrome-related coronavirus
  REGION 1..14: note = Table B: HLA-DRB1*15:03L
  source 1..14: note = Severe acute respiratory syndrome coronavirus 2
PDYNTYKNTCDGTT

SEQ ID NO: 26640 - protein, 12 aa, Severe acute respiratory syndrome-related coronavirus
  REGION 1..12: note = Table B: HLA-DRB1*15:03L
  source 1..12: note = Severe acute respiratory syndrome coronavirus 2
VLGSLAATVRLQ

SEQ ID NO: 26641 - protein, 13 aa, Severe acute respiratory syndrome-related coronavirus
  REGION 1..13: note = Table B: HLA-DRB1*15:03L
  source 1..13: note = Severe acute respiratory syndrome coronavirus 2
NSTVLSFCAFAVD

SEQ ID NO: 26642 - protein, 13 aa, Severe acute respiratory syndrome-related coronavirus
  REGION 1..13: note = Table B: HLA-DRB1*15:03L
  source 1..13: note = Severe acute respiratory syndrome coronavirus 2
STVLSFCAFAVDA

SEQ ID NO: 26643 - protein, 12 aa, Severe acute respiratory syndrome-related coronavirus
  REGION 1..12: note = Table B: HLA-DRB1*15:03L
  source 1..12: note = Severe acute respiratory syndrome coronavirus 2
RLTKYTMADLVY

SEQ ID NO: 26644 - protein, 14 aa, Severe acute respiratory syndrome-related coronavirus
  REGION 1..14: note = Table B: HLA-DRB1*15:03L
  source 1..14: note = Severe acute respiratory syndrome coronavirus 2
PVVDSYYSLLMPIL

SEQ ID NO: 26645 - protein, 15 aa, Severe acute respiratory syndrome-related coronavirus
  REGION 1..15: note = Table B: HLA-DRB1*15:03L
  source 1..15: note = Severe acute respiratory syndrome coronavirus 2
TRALTAESHVDTDLT

SEQ ID NO: 26646 - protein, 16 aa, Severe acute respiratory syndrome-related coronavirus
  REGION 1..16: note = Table B: HLA-DRB1*15:03L
  source 1..16: note = Severe acute respiratory syndrome coronavirus 2
VDTDLTKPYIKWDLLK

SEQ ID NO: 26647 - protein, 14 aa, Severe acute respiratory syndrome-related coronavirus
  REGION 1..14: note = Table B: HLA-DRB1*15:03L
  source 1..14: note = Severe acute respiratory syndrome coronavirus 2
KYDFTEERLKLFDR

SEQ ID NO: 26648 - protein, 12 aa, Severe acute respiratory syndrome-related coronavirus
  REGION 1..12: note = Table B: HLA-DRB1*15:03L
  source 1..12: note = Severe acute respiratory syndrome coronavirus 2
FVVSTGYHFREL

SEQ ID NO: 26649 - protein, 15 aa, Severe acute respiratory syndrome-related coronavirus
  REGION 1..15: note = Table B: HLA-DRB1*15:03L
  source 1..15: note = Severe acute respiratory syndrome coronavirus 2
LPTMCDIRQLLFVVE

SEQ ID NO: 26650 - protein, 14 aa, Severe acute respiratory syndrome-related coronavirus
  REGION 1..14: note = Table B: HLA-DRB1*15:03L
  source 1..14: note = Severe acute respiratory syndrome coronavirus 2
DGGCINANQVIVNN

SEQ ID NO: 26651 - protein, 13 aa, Severe acute respiratory syndrome-related coronavirus
  REGION 1..13: note = Table B: HLA-DRB1*15:03L
  source 1..13: note = Severe acute respiratory syndrome coronavirus 2
SKFYGGWHNMLKT

SEQ ID NO: 26652 - protein, 14 aa, Severe acute respiratory syndrome-related coronavirus
  REGION 1..14: note = Table B: HLA-DRB1*15:03L
  source 1..14: note = Severe acute respiratory syndrome coronavirus 2
KFYGGWHNMLKTVY

SEQ ID NO: 26653 - protein, 14 aa, Severe acute respiratory syndrome-related coronavirus
  REGION 1..14: note = Table B: HLA-DRB1*15:03L
  source 1..14: note = Severe acute respiratory syndrome coronavirus 2
GGWHNMLKTVYSDV

SEQ ID NO: 26654 - protein, 14 aa, Severe acute respiratory syndrome-related coronavirus
  REGION 1..14: note = Table B: HLA-DRB1*15:03L
  source 1..14: note = Severe acute respiratory syndrome coronavirus 2
PHLMGWDYPKCDRA

SEQ ID NO: 26655 - protein, 13 aa, Severe acute respiratory syndrome-related coronavirus
  REGION 1..13: note = Table B: HLA-DRB1*15:03L
  source 1..13: note = Severe acute respiratory syndrome coronavirus 2
VLSEMVMCGGSLY

SEQ ID NO: 26656 - protein, 15 aa, Severe acute respiratory syndrome-related coronavirus
  REGION 1..15: note = Table B: HLA-DRB1*15:03L
  source 1..15: note = Severe acute respiratory syndrome coronavirus 2
RLYECLYRNRDVDTD

SEQ ID NO: 26657 - protein, 10 aa, Severe acute respiratory syndrome-related coronavirus
  REGION 1..10: note = Table B: HLA-DRB1*15:03L
  source 1..10: note = Severe acute respiratory syndrome coronavirus 2
IKNFKSVLYY

SEQ ID NO: 26658 - protein, 16 aa, Severe acute respiratory syndrome-related coronavirus
  REGION 1..16: note = Table B: HLA-DRB1*15:03L
  source 1..16: note = Severe acute respiratory syndrome coronavirus 2
YQNNVFMSEAKCWTET

SEQ ID NO: 26659 - protein, 16 aa, Severe acute respiratory syndrome-related coronavirus
  REGION 1..16: note = Table B: HLA-DRB1*15:03L
  source 1..16: note = Severe acute respiratory syndrome coronavirus 2
HEFCSQHTMLVKQGDD

SEQ ID NO: 26660 - protein, 14 aa, Severe acute respiratory syndrome-related coronavirus
  REGION 1..14: note = Table B: HLA-DRB1*15:03L
  source 1..14: note = Severe acute respiratory syndrome coronavirus 2
KLVLSVNPYVCNAP

SEQ ID NO: 26661 - protein, 11 aa, Severe acute respiratory syndrome-related coronavirus
  REGION 1..11: note = Table B: HLA-DRB1*15:03L
  source 1..11: note = Severe acute respiratory syndrome coronavirus 2
VFGLYKNTCVG

SEQ ID NO: 26662 - protein, 12 aa, Severe acute respiratory syndrome-related coronavirus
  REGION 1..12: note = Table B: HLA-DRB1*15:03L
  source 1..12: note = Severe acute respiratory syndrome coronavirus 2
FGLYKNTCVGSD

SEQ ID NO: 26663 - protein, 16 aa, Severe acute respiratory syndrome-related coronavirus
  REGION 1..16: note = Table B: HLA-DRB1*15:03L
  source 1..16: note = Severe acute respiratory syndrome coronavirus 2
VTDFNAIATCDWTNAG

SEQ ID NO: 26664 - protein, 11 aa, Severe acute respiratory syndrome-related coronavirus
  REGION 1..11: note = Table B: HLA-DRB1*15:03L
  source 1..11: note = Severe acute respiratory syndrome coronavirus 2
YILANTCTERL

SEQ ID NO: 26665 - protein, 16 aa, Severe acute respiratory syndrome-related coronavirus
  REGION 1..16: note = Table B: HLA-DRB1*15:03L
  source 1..16: note = Severe acute respiratory syndrome coronavirus 2
SDRELHLSWEVGKPRP

SEQ ID NO: 26666 - protein, 12 aa, Severe acute respiratory syndrome-related coronavirus
  REGION 1..12: note = Table B: HLA-DRB1*15:03L
  source 1..12: note = Severe acute respiratory syndrome coronavirus 2
YTFEKGDYGDAV

SEQ ID NO: 26667 - protein, 12 aa, Severe acute respiratory syndrome-related coronavirus
  REGION 1..12: note = Table B: HLA-DRB1*15:03L
  source 1..12: note = Severe acute respiratory syndrome coronavirus 2
IGVVREFLTRNP

SEQ ID NO: 26668 - protein, 13 aa, Severe acute respiratory syndrome-related coronavirus
  REGION 1..13: note = Table B: HLA-DRB1*15:03L
  source 1..13: note = Severe acute respiratory syndrome coronavirus 2
FLTRNPAWRKAVF

SEQ ID NO: 26669 - protein, 16 aa, Severe acute respiratory syndrome-related coronavirus
  REGION 1..16: note = Table B: HLA-DRB1*15:03L
  source 1..16: note = Severe acute respiratory syndrome coronavirus 2
SQNAVASKILGLPTQT

SEQ ID NO: 26670 - protein, 11 aa, Severe acute respiratory syndrome-related coronavirus
  REGION 1..11: note = Table B: HLA-DRB1*15:03L
  source 1..11: note = Severe acute respiratory syndrome coronavirus 2
QVNGYPNMFIT

SEQ ID NO: 26671 - protein, 11 aa, Severe acute respiratory syndrome-related coronavirus
  REGION 1..11: note = Table B: HLA-DRB1*15:03L
  source 1..11: note = Severe acute respiratory syndrome coronavirus 2
MFITREEAIRH

SEQ ID NO: 26672 - protein, 14 aa, Severe acute respiratory syndrome-related coronavirus
  REGION 1..14: note = Table B: HLA-DRB1*15:03L
  source 1..14: note = Severe acute respiratory syndrome coronavirus 2
DTYACWHHSIGFDY

SEQ ID NO: 26673 - protein, 15 aa, Severe acute respiratory syndrome-related coronavirus
  REGION 1..15: note = Table B: HLA-DRB1*15:03L
  source 1..15: note = Severe acute respiratory syndrome coronavirus 2
NHDLYCQVHGNAHVA

SEQ ID NO: 26674 - protein, 14 aa, Severe acute respiratory syndrome-related coronavirus
  REGION 1..14: note = Table B: HLA-DRB1*15:03L
  source 1..14: note = Severe acute respiratory syndrome coronavirus 2
HMVVKAALLADKFP

SEQ ID NO: 26675 - protein, 13 aa, Severe acute respiratory syndrome-related coronavirus
  REGION 1..13: note = Table B: HLA-DRB1*15:03L
  source 1..13: note = Severe acute respiratory syndrome coronavirus 2
ADVEWKFYDAQPC

SEQ ID NO: 26676 - protein, 12 aa, Severe acute respiratory syndrome-related coronavirus
  REGION 1..12: note = Table B: HLA-DRB1*15:03L
  source 1..12: note = Severe acute respiratory syndrome coronavirus 2
KFYDAQPCSDKA

SEQ ID NO: 26677 - protein, 13 aa, Severe acute respiratory syndrome-related coronavirus
  REGION 1..13: note = Table B: HLA-DRB1*15:03L
  source 1..13: note = Severe acute respiratory syndrome coronavirus 2
TRVLSNLNLPGCD

SEQ ID NO: 26678 - protein, 12 aa, Severe acute respiratory syndrome-related coronavirus
  REGION 1..12: note = Table B: HLA-DRB1*15:03L
  source 1..12: note = Severe acute respiratory syndrome coronavirus 2
PFFYYSDSPCES

SEQ ID NO: 26679 - protein, 11 aa, Severe acute respiratory syndrome-related coronavirus
  REGION 1..11: note = Table B: HLA-DRB1*15:03L
  source 1..11: note = Severe acute respiratory syndrome coronavirus 2
EYRLYLDAYNM

SEQ ID NO: 26680 - protein, 10 aa, Severe acute respiratory syndrome-related coronavirus
  REGION 1..10: note = Table B: HLA-DRB1*15:03L
  source 1..10: note = Severe acute respiratory syndrome coronavirus 2
IKPVPEVKIL

SEQ ID NO: 26681 - protein, 13 aa, Severe acute respiratory syndrome-related coronavirus
  REGION 1..13: note = Table B: HLA-DRB1*15:03L
  source 1..13: note = Severe acute respiratory syndrome coronavirus 2
NLGVDIAANTVIW

SEQ ID NO: 26682 - protein, 14 aa, Severe acute respiratory syndrome-related coronavirus
  REGION 1..14: note = Table B: HLA-DRB1*15:03L
  source 1..14: note = Severe acute respiratory syndrome coronavirus 2
IGVCSMTDIAKKPT

SEQ ID NO: 26683 - protein, 12 aa, Severe acute respiratory syndrome-related coronavirus
  REGION 1..12: note = Table B: HLA-DRB1*15:03L
  source 1..12: note = Severe acute respiratory syndrome coronavirus 2
PLTVFFDGRVDG

SEQ ID NO: 26684 - protein, 16 aa, Severe acute respiratory syndrome-related coronavirus
  REGION 1..16: note = Table B: HLA-DRB1*15:03L
  source 1..16: note = Severe acute respiratory syndrome coronavirus 2
VGPKQASLNGVTLIGE

SEQ ID NO: 26685 - protein, 13 aa, Severe acute respiratory syndrome-related coronavirus
  REGION 1..13: note = Table B: HLA-DRB1*15:03L
  source 1..13: note = Severe acute respiratory syndrome coronavirus 2
LNGVTLIGEAVKT

SEQ ID NO: 26686 - protein, 14 aa, Severe acute respiratory syndrome-related coronavirus
  REGION 1..14: note = Table B: HLA-DRB1*15:03L
  source 1..14: note = Severe acute respiratory syndrome coronavirus 2
EFKPRSQMEIDFLE

SEQ ID NO: 26687 - protein, 12 aa, Severe acute respiratory syndrome-related coronavirus
  REGION 1..12: note = Table B: HLA-DRB1*15:03L
  source 1..12: note = Severe acute respiratory syndrome coronavirus 2
FIERYKLEGYAF

SEQ ID NO: 26688 - protein, 13 aa, Severe acute respiratory syndrome-related coronavirus
  REGION 1..13: note = Table B: HLA-DRB1*15:03L
  source 1..13: note = Severe acute respiratory syndrome coronavirus 2
KDGHVETFYPKLQ

SEQ ID NO: 26689 - protein, 13 aa, Severe acute respiratory syndrome-related coronavirus
  REGION 1..13: note = Table B: HLA-DRB1*15:03L
  source 1..13: note = Severe acute respiratory syndrome coronavirus 2
TQLCQYLNTLTLA

SEQ ID NO: 26690 - protein, 12 aa, Severe acute respiratory syndrome-related coronavirus
  REGION 1..12: note = Table B: HLA-DRB1*15:03L
  source 1..12: note = Severe acute respiratory syndrome coronavirus 2
ANKWDLIISDMY

SEQ ID NO: 26691 - protein, 13 aa, Severe acute respiratory syndrome-related coronavirus
  REGION 1..13: note = Table B: HLA-DRB1*15:03L
  source 1..13: note = Severe acute respiratory syndrome coronavirus 2
EGFFTYICGFIQQ

SEQ ID NO: 26692 - protein, 14 aa, Severe acute respiratory syndrome-related coronavirus
  REGION 1..14: note = Table B: HLA-DRB1*15:03L
  source 1..14: note = Severe acute respiratory syndrome coronavirus 2
AFLIGCNYLGKPRE

SEQ ID NO: 26693 - protein, 12 aa, Severe acute respiratory syndrome-related coronavirus
  REGION 1..12: note = Table B: HLA-DRB1*15:03L
  source 1..12: note = Severe acute respiratory syndrome coronavirus 2
LLPLVSSQCVNL

SEQ ID NO: 26694 - protein, 12 aa, Severe acute respiratory syndrome-related coronavirus
  REGION 1..12: note = Table B: HLA-DRB1*15:03L
  source 1..12: note = Severe acute respiratory syndrome coronavirus 2
FSNVTWFHAIHV

SEQ ID NO: 26695 - protein, 16 aa, Severe acute respiratory syndrome-related coronavirus
  REGION 1..16: note = Table B: HLA-DRB1*15:03L
  source 1..16: note = Severe acute respiratory syndrome coronavirus 2
AIHVSGTNGTKRFDNP

SEQ ID NO: 26696 - protein, 12 aa, Severe acute respiratory syndrome-related coronavirus
  REGION 1..12: note = Table B: HLA-DRB1*15:03L
  source 1..12: note = Severe acute respiratory syndrome coronavirus 2
VFKNIDGYFKIY

SEQ ID NO: 26697 - protein, 16 aa, Severe acute respiratory syndrome-related coronavirus
  REGION 1..16: note = Table B: HLA-DRB1*15:03L
  source 1..16: note = Severe acute respiratory syndrome coronavirus 2
TPGDSSSGWTAGAAAY

SEQ ID NO: 26698 - protein, 14 aa, Severe acute respiratory syndrome-related coronavirus
  REGION 1..14: note = Table B: HLA-DRB1*15:03L
  source 1..14: note = Severe acute respiratory syndrome coronavirus 2
TAGAAAYYVGYLQP

SEQ ID NO: 26699 - protein, 13 aa, Severe acute respiratory syndrome-related coronavirus
  REGION 1..13: note = Table B: HLA-DRB1*15:03L
  source 1..13: note = Severe acute respiratory syndrome coronavirus 2
GAAAYYVGYLQPR

SEQ ID NO: 26700 - protein, 15 aa, Severe acute respiratory syndrome-related coronavirus
  REGION 1..15: note = Table B: HLA-DRB1*15:03L
  source 1..15: note = Severe acute respiratory syndrome coronavirus 2
ISNCVADYSVLYNSA

SEQ ID NO: 26701 - protein, 13 aa, Severe acute respiratory syndrome-related coronavirus
  REGION 1..13: note = Table B: HLA-DRB1*15:03L
  source 1..13: note = Severe acute respiratory syndrome coronavirus 2
ASFSTFKCYGVSP

SEQ ID NO: 26702 - protein, 12 aa, Severe acute respiratory syndrome-related coronavirus
  REGION 1..12: note = Table B: HLA-DRB1*15:03L
  source 1..12: note = Severe acute respiratory syndrome coronavirus 2
FNCYFPLQSYGF

SEQ ID NO: 26703 - protein, 14 aa, Severe acute respiratory syndrome-related coronavirus
  REGION 1..14: note = Table B: HLA-DRB1*15:03L
  source 1..14: note = Severe acute respiratory syndrome coronavirus 2
TEVPVAIHADQLTP

SEQ ID NO: 26704 - protein, 15 aa, Severe acute respiratory syndrome-related coronavirus
  REGION 1..15: note = Table B: HLA-DRB1*15:03L
  source 1..15: note = Severe acute respiratory syndrome coronavirus 2
AGICASYQTQTNSPR

SEQ ID NO: 26705 - protein, 14 aa, Severe acute respiratory syndrome-related coronavirus
  REGION 1..14: note = Table B: HLA-DRB1*15:03L
  source 1..14: note = Severe acute respiratory syndrome coronavirus 2
NFTISVTTEILPVS

SEQ ID NO: 26706 - protein, 15 aa, Severe acute respiratory syndrome-related coronavirus
  REGION 1..15: note = Table B: HLA-DRB1*15:03L
  source 1..15: note = Severe acute respiratory syndrome coronavirus 2
LPVSMTKTSVDCTMY

SEQ ID NO: 26707 - protein, 12 aa, Severe acute respiratory syndrome-related coronavirus
  REGION 1..12: note = Table B: HLA-DRB1*15:03L
  source 1..12: note = Severe acute respiratory syndrome coronavirus 2
PPIKDFGGFNFS

SEQ ID NO: 26708 - protein, 13 aa, Severe acute respiratory syndrome-related coronavirus
  REGION 1..13: note = Table B: HLA-DRB1*15:03L
  source 1..13: note = Severe acute respiratory syndrome coronavirus 2
LFNKVTLADAGFI

SEQ ID NO: 26709 - protein, 11 aa, Severe acute respiratory syndrome-related coronavirus
  REGION 1..11: note = Table B: HLA-DRB1*15:03L
  source 1..11: note = Severe acute respiratory syndrome coronavirus 2
KVTLADAGFIK

SEQ ID NO: 26710 - protein, 12 aa, Severe acute respiratory syndrome-related coronavirus
  REGION 1..12: note = Table B: HLA-DRB1*15:03L
  source 1..12: note = Severe acute respiratory syndrome coronavirus 2
GFIKQYGDCLGD

SEQ ID NO: 26711 - protein, 12 aa, Severe acute respiratory syndrome-related coronavirus
  REGION 1..12: note = Table B: HLA-DRB1*15:03L
  source 1..12: note = Severe acute respiratory syndrome coronavirus 2
PFAMQMAYRFNG

SEQ ID NO: 26712 - protein, 13 aa, Severe acute respiratory syndrome-related coronavirus
  REGION 1..13: note = Table B: HLA-DRB1*15:03L
  source 1..13: note = Severe acute respiratory syndrome coronavirus 2
MQMAYRFNGIGVT

SEQ ID NO: 26713 - protein, 13 aa, Severe acute respiratory syndrome-related coronavirus
  REGION 1..13: note = Table B: HLA-DRB1*15:03L
  source 1..13: note = Severe acute respiratory syndrome coronavirus 2
ALNTLVKQLSSNF

SEQ ID NO: 26714 - protein, 12 aa, Severe acute respiratory syndrome-related coronavirus
  REGION 1..12: note = Table B: HLA-DRB1*15:03L
  source 1..12: note = Severe acute respiratory syndrome coronavirus 2
LVKQLSSNFGAI

SEQ ID NO: 26715 - protein, 13 aa, Severe acute respiratory syndrome-related coronavirus
  REGION 1..13: note = Table B: HLA-DRB1*15:03L
  source 1..13: note = Severe acute respiratory syndrome coronavirus 2
ELDKYFKNHTSPD

SEQ ID NO: 26716 - protein, 13 aa, Severe acute respiratory syndrome-related coronavirus
  REGION 1..13: note = Table B: HLA-DRB1*15:03L
  source 1..13: note = Severe acute respiratory syndrome coronavirus 2
QKEIDRLNEVAKN

SEQ ID NO: 26717 - protein, 14 aa, Severe acute respiratory syndrome-related coronavirus
  REGION 1..14: note = Table B: HLA-DRB1*15:03L
  source 1..14: note = Severe acute respiratory syndrome coronavirus 2
LGFIAGLIAIVMVT

SEQ ID NO: 26718 - protein, 14 aa, Severe acute respiratory syndrome-related coronavirus
  REGION 1..14: note = Table B: HLA-DRB1*15:03L
  source 1..14: note = Severe acute respiratory syndrome coronavirus 2
IGTVTLKQGEIKDA

SEQ ID NO: 26719 - protein, 12 aa, Severe acute respiratory syndrome-related coronavirus
  REGION 1..12: note = Table B: HLA-DRB1*15:03L
  source 1..12: note = Severe acute respiratory syndrome coronavirus 2
LLAVFQSASKII

SEQ ID NO: 26720 - protein, 13 aa, Severe acute respiratory syndrome-related coronavirus
  REGION 1..13: note = Table B: HLA-DRB1*15:03L
  source 1..13: note = Severe acute respiratory syndrome coronavirus 2
IITLKKRWQLALS

SEQ ID NO: 26721 - protein, 13 aa, Severe acute respiratory syndrome-related coronavirus
  REGION 1..13: note = Table B: HLA-DRB1*15:03L
  source 1..13: note = Severe acute respiratory syndrome coronavirus 2
SKGVHFVCNLLLL

SEQ ID NO: 26722 - protein, 11 aa, Severe acute respiratory syndrome-related coronavirus
  REGION 1..11: note = Table B: HLA-DRB1*15:03L
  source 1..11: note = Severe acute respiratory syndrome coronavirus 2
APFLYLYALVY

SEQ ID NO: 26723 - protein, 10 aa, Severe acute respiratory syndrome-related coronavirus
  REGION 1..10: note = Table B: HLA-DRB1*15:03L
  source 1..10: note = Severe acute respiratory syndrome coronavirus 2
LVYFLQSINF

SEQ ID NO: 26724 - protein, 12 aa, Severe acute respiratory syndrome-related coronavirus
  REGION 1..12: note = Table B: HLA-DRB1*15:03L
  source 1..12: note = Severe acute respiratory syndrome coronavirus 2
SINFVRIIMRLW

SEQ ID NO: 26725 - protein, 14 aa, Severe acute respiratory syndrome-related coronavirus
  REGION 1..14: note = Table B: HLA-DRB1*15:03L
  source 1..14: note = Severe acute respiratory syndrome coronavirus 2
IIMRLWLCWKCRSK

SEQ ID NO: 26726 - protein, 16 aa, Severe acute respiratory syndrome-related coronavirus
  REGION 1..16: note = Table B: HLA-DRB1*15:03L
  source 1..16: note = Severe acute respiratory syndrome coronavirus 2
IMRLWLCWKCRSKNPL

SEQ ID NO: 26727 - protein, 14 aa, Severe acute respiratory syndrome-related coronavirus
  REGION 1..14: note = Table B: HLA-DRB1*15:03L
  source 1..14: note = Severe acute respiratory syndrome coronavirus 2
GVEHVTFFIYNKIV

SEQ ID NO: 26728 - protein, 13 aa, Severe acute respiratory syndrome-related coronavirus
  REGION 1..13: note = Table B: HLA-DRB1*15:03L
  source 1..13: note = Severe acute respiratory syndrome coronavirus 2
TIDGSSGVVNPVM

SEQ ID NO: 26729 - protein, 11 aa, Severe acute respiratory syndrome-related coronavirus
  REGION 1..11: note = Table B: HLA-DRB1*15:03L
  source 1..11: note = Severe acute respiratory syndrome coronavirus 2
EQWNLVIGFLF

SEQ ID NO: 26730 - protein, 10 aa, Severe acute respiratory syndrome-related coronavirus
  REGION 1..10: note = Table B: HLA-DRB1*15:03L
  source 1..10: note = Severe acute respiratory syndrome coronavirus 2
FLYIIKLIFL

SEQ ID NO: 26731 - protein, 13 aa, Severe acute respiratory syndrome-related coronavirus
  REGION 1..13: note = Table B: HLA-DRB1*15:03L
  source 1..13: note = Severe acute respiratory syndrome coronavirus 2
TRSMWSFNPETNI

SEQ ID NO: 26732 - protein, 13 aa, Severe acute respiratory syndrome-related coronavirus
  REGION 1..13: note = Table B: HLA-DRB1*15:03L
  source 1..13: note = Severe acute respiratory syndrome coronavirus 2
RTLSYYKLGASQR

SEQ ID NO: 26733 - protein, 14 aa, Severe acute respiratory syndrome-related coronavirus
  REGION 1..14: note = Table B: HLA-DRB1*15:03L
  source 1..14: note = Severe acute respiratory syndrome coronavirus 2
RYRIGNYKLNTDHS

SEQ ID NO: 26734 - protein, 14 aa, Severe acute respiratory syndrome-related coronavirus
  REGION 1..14: note = Table B: HLA-DRB1*15:03L
  source 1..14: note = Severe acute respiratory syndrome coronavirus 2
LGSLVVRCSFYEDF

SEQ ID NO: 26735 - protein, 13 aa, Severe acute respiratory syndrome-related coronavirus
  REGION 1..13: note = Table B: HLA-DRB1*15:03L
  source 1..13: note = Severe acute respiratory syndrome coronavirus 2
VVRCSFYEDFLEY

SEQ ID NO: 26736 - protein, 12 aa, Severe acute respiratory syndrome-related coronavirus
  REGION 1..12: note = Table B: HLA-DRB1*15:03L
  source 1..12: note = Severe acute respiratory syndrome coronavirus 2
YEDFLEYHDVRV

SEQ ID NO: 26737 - protein, 14 aa, Severe acute respiratory syndrome-related coronavirus
  REGION 1..14: note = Table B: HLA-DRB1*15:03L
  source 1..14: note = Severe acute respiratory syndrome coronavirus 2
QIGYYRRATRRIRG

SEQ ID NO: 26738 - protein, 15 aa, Severe acute respiratory syndrome-related coronavirus
  REGION 1..15: note = Table B: HLA-DRB1*15:03L
  source 1..15: note = Severe acute respiratory syndrome coronavirus 2
IGYYRRATRRIRGGD

SEQ ID NO: 26739 - protein, 18 aa, Severe acute respiratory syndrome-related coronavirus
  REGION 1..18: note = Table B: HLA-DRB1*15:03L
  source 1..18: note = Severe acute respiratory syndrome coronavirus 2
ATRRIRGGDGKMKDLSPR

SEQ ID NO: 26740 - protein, 14 aa, Severe acute respiratory syndrome-related coronavirus
  REGION 1..14: note = Table B: HLA-DRB1*15:03L
  source 1..14: note = Severe acute respiratory syndrome coronavirus 2
FPFTIYSLLLCRMN

SEQ ID NO: 26741 - protein, 8 aa, Severe acute respiratory syndrome-related coronavirus
  REGION 1..8: note = Table C
  source 1..8: note = Severe acute respiratory syndrome coronavirus 2
DSAEVAVK

SEQ ID NO: 26742 - protein, 8 aa, Severe acute respiratory syndrome-related coronavirus
  REGION 1..8: note = Table C
  source 1..8: note = Severe acute respiratory syndrome coronavirus 2
SAEVAVKM

SEQ ID NO: 26743 - protein, 8 aa, Severe acute respiratory syndrome-related coronavirus
  REGION 1..8: note = Table C
  source 1..8: note = Severe acute respiratory syndrome coronavirus 2
AEVAVKMF

SEQ ID NO: 26744 - protein, 8 aa, Severe acute respiratory syndrome-related coronavirus
  REGION 1..8: note = Table C
  source 1..8: note = Severe acute respiratory syndrome coronavirus 2
VAVKMFDA

SEQ ID NO: 26745 - protein, 8 aa, Severe acute respiratory syndrome-related coronavirus
  REGION 1..8: note = Table C
  source 1..8: note = Severe acute respiratory syndrome coronavirus 2
AVKMFDAY

SEQ ID NO: 26746 - protein, 8 aa, Severe acute respiratory syndrome-related coronavirus
  REGION 1..8: note = Table C
  source 1..8: note = Severe acute respiratory syndrome coronavirus 2
FDAYVNTF

SEQ ID NO: 26747 - protein, 8 aa, Severe acute respiratory syndrome-related coronavirus
  REGION 1..8: note = Table C
  source 1..8: note = Severe acute respiratory syndrome coronavirus 2
HTDFSSEI

SEQ ID NO: 26748 - protein, 8 aa, Severe acute respiratory syndrome-related coronavirus
  REGION 1..8: note = Table C
  source 1..8: note = Severe acute respiratory syndrome coronavirus 2
FSSEIIGY

SEQ ID NO: 26749 - protein, 8 aa, Severe acute respiratory syndrome-related coronavirus
  REGION 1..8: note = Table C
  source 1..8: note = Severe acute respiratory syndrome coronavirus 2
SSEIIGYK

SEQ ID NO: 26750 - protein, 8 aa, Severe acute respiratory syndrome-related coronavirus
  REGION 1..8: note = Table C
  source 1..8: note = Severe acute respiratory syndrome coronavirus 2
SEIIGYKA

SEQ ID NO: 26751 - protein, 8 aa, Severe acute respiratory syndrome-related coronavirus
  REGION 1..8: note = Table C
  source 1..8: note = Severe acute respiratory syndrome coronavirus 2
TDDNALAY

SEQ ID NO: 26752 - protein, 8 aa, Severe acute respiratory syndrome-related coronavirus
  REGION 1..8: note = Table C
  source 1..8: note = Severe acute respiratory syndrome coronavirus 2
DDNALAYY

SEQ ID NO: 26753 - protein, 8 aa, Severe acute respiratory syndrome-related coronavirus
  REGION 1..8: note = Table C
  source 1..8: note = Severe acute respiratory syndrome coronavirus 2
LAYYNTTK

SEQ ID NO: 26754 - protein, 8 aa, Severe acute respiratory syndrome-related coronavirus
  REGION 1..8: note = Table C
  source 1..8: note = Severe acute respiratory syndrome coronavirus 2
TDVVYRAF

SEQ ID NO: 26755 - protein, 8 aa, Severe acute respiratory syndrome-related coronavirus
  REGION 1..8: note = Table C
  source 1..8: note = Severe acute respiratory syndrome coronavirus 2
FDIYNDKV

SEQ ID NO: 26756 - protein, 8 aa, Severe acute respiratory syndrome-related coronavirus
  REGION 1..8: note = Table C
  source 1..8: note = Severe acute respiratory syndrome coronavirus 2
YNDKVAGF

SEQ ID NO: 26757 - protein, 8 aa, Severe acute respiratory syndrome-related coronavirus
  REGION 1..8: note = Table C
  source 1..8: note = Severe acute respiratory syndrome coronavirus 2
VAGFAKFL

SEQ ID NO: 26758 - protein, 8 aa, Severe acute respiratory syndrome-related coronavirus
  REGION 1..8: note = Table C
  source 1..8: note = Severe acute respiratory syndrome coronavirus 2
AGFAKFLK

SEQ ID NO: 26759 - protein, 8 aa, Severe acute respiratory syndrome-related coronavirus
  REGION 1..8: note = Table C
  source 1..8: note = Severe acute respiratory syndrome coronavirus 2
DVTDVTQL

SEQ ID NO: 26760 - protein, 8 aa, Severe acute respiratory syndrome-related coronavirus
  REGION 1..8: note = Table C
  source 1..8: note = Severe acute respiratory syndrome coronavirus 2
VTDVTQLY

SEQ ID NO: 26761 - protein, 8 aa, Severe acute respiratory syndrome-related coronavirus
  REGION 1..8: note = Table C
  source 1..8: note = Severe acute respiratory syndrome coronavirus 2
TDVTQLYL

SEQ ID NO: 26762 - protein, 8 aa, Severe acute respiratory syndrome-related coronavirus
  REGION 1..8: note = Table C
  source 1..8: note = Severe acute respiratory syndrome coronavirus 2
LYLGGMSY

SEQ ID NO: 26763 - protein, 8 aa, Severe acute respiratory syndrome-related coronavirus
  REGION 1..8: note = Table C
  source 1..8: note = Severe acute respiratory syndrome coronavirus 2
YLGGMSYY

SEQ ID NO: 26764 - protein, 9 aa, Severe acute respiratory syndrome-related coronavirus
  REGION 1..9: note = Table C
  source 1..9: note = Severe acute respiratory syndrome coronavirus 2
VGDSAEVAV

SEQ ID NO: 26765 - protein, 9 aa, Severe acute respiratory syndrome-related coronavirus
  REGION 1..9: note = Table C
  source 1..9: note = Severe acute respiratory syndrome coronavirus 2
DSAEVAVKM

SEQ ID NO: 26766 - protein, 9 aa, Severe acute respiratory syndrome-related coronavirus
  REGION 1..9: note = Table C
  source 1..9: note = Severe acute respiratory syndrome coronavirus 2
SAEVAVKMF

SEQ ID NO: 26767 - protein, 9 aa, Severe acute respiratory syndrome-related coronavirus
  REGION 1..9: note = Table C
  source 1..9: note = Severe acute respiratory syndrome coronavirus 2
VAVKMFDAY

SEQ ID NO: 26768 - protein, 9 aa, Severe acute respiratory syndrome-related coronavirus
  REGION 1..9: note = Table C
  source 1..9: note = Severe acute respiratory syndrome coronavirus 2
AVKMFDAYV

SEQ ID NO: 26769 - protein, 9 aa, Severe acute respiratory syndrome-related coronavirus
  REGION 1..9: note = Table C
  source 1..9: note = Severe acute respiratory syndrome coronavirus 2
KMFDAYVNT

SEQ ID NO: 26770 - protein, 9 aa, Severe acute respiratory syndrome-related coronavirus
  REGION 1..9: note = Table C
  source 1..9: note = Severe acute respiratory syndrome coronavirus 2
MFDAYVNTF

SEQ ID NO: 26771 - protein, 9 aa, Severe acute respiratory syndrome-related coronavirus
  REGION 1..9: note = Table C
  source 1..9: note = Severe acute respiratory syndrome coronavirus 2
YVNTFSSTF

SEQ ID NO: 26772 - protein, 9 aa, Severe acute respiratory syndrome-related coronavirus
  REGION 1..9: note = Table C
  source 1..9: note = Severe acute respiratory syndrome coronavirus 2
NTFSSTFNV

SEQ ID NO: 26773 - protein, 9 aa, Severe acute respiratory syndrome-related coronavirus
  REGION 1..9: note = Table C
  source 1..9: note = Severe acute respiratory syndrome coronavirus 2
HVMSKHTDF

SEQ ID NO: 26774 - protein, 9 aa, Severe acute respiratory syndrome-related coronavirus
  REGION 1..9: note = Table C
  source 1..9: note = Severe acute respiratory syndrome coronavirus 2
KHTDFSSEI

SEQ ID NO: 26775 - protein, 9 aa, Severe acute respiratory syndrome-related coronavirus
  REGION 1..9: note = Table C
  source 1..9: note = Severe acute respiratory syndrome coronavirus 2
HTDFSSEII

SEQ ID NO: 26776 - protein, 9 aa, Severe acute respiratory syndrome-related coronavirus
  REGION 1..9: note = Table C
  source 1..9: note = Severe acute respiratory syndrome coronavirus 2
DFSSEIIGY

SEQ ID NO: 26777 - protein, 9 aa, Severe acute respiratory syndrome-related coronavirus
  REGION 1..9: note = Table C
  source 1..9: note = Severe acute respiratory syndrome coronavirus 2
FSSEIIGYK

SEQ ID NO: 26778 - protein, 9 aa, Severe acute respiratory syndrome-related coronavirus
  REGION 1..9: note = Table C
  source 1..9: note = Severe acute respiratory syndrome coronavirus 2
SEIIGYKAI

SEQ ID NO: 26779 - protein, 9 aa, Severe acute respiratory syndrome-related coronavirus
  REGION 1..9: note = Table C
  source 1..9: note = Severe acute respiratory syndrome coronavirus 2
KAIDGGVTR

SEQ ID NO: 26780 - protein, 9 aa, Severe acute respiratory syndrome-related coronavirus
  REGION 1..9: note = Table C
  source 1..9: note = Severe acute respiratory syndrome coronavirus 2
CAAGTTQTA

SEQ ID NO: 26781 - protein, 9 aa, Severe acute respiratory syndrome-related coronavirus
  REGION 1..9: note = Table C
  source 1..9: note = Severe acute respiratory syndrome coronavirus 2
AAGTTQTAC

SEQ ID NO: 26782 - protein, 9 aa, Severe acute respiratory syndrome-related coronavirus
  REGION 1..9: note = Table C
  source 1..9: note = Severe acute respiratory syndrome coronavirus 2
TACTDDNAL

SEQ ID NO: 26783 - protein, 9 aa, Severe acute respiratory syndrome-related coronavirus
  REGION 1..9: note = Table C
  source 1..9: note = Severe acute respiratory syndrome coronavirus 2
CTDDNALAY

SEQ ID NO: 26784 - protein, 9 aa, Severe acute respiratory syndrome-related coronavirus
  REGION 1..9: note = Table C
  source 1..9: note = Severe acute respiratory syndrome coronavirus 2
TDDNALAYY

SEQ ID NO: 26785 - protein, 9 aa, Severe acute respiratory syndrome-related coronavirus
  REGION 1..9: note = Table C
  source 1..9: note = Severe acute respiratory syndrome coronavirus 2
ALAYYNTTK

SEQ ID NO: 26786 - protein, 9 aa, Severe acute respiratory syndrome-related coronavirus
  REGION 1..9: note = Table C
  source 1..9: note = Severe acute respiratory syndrome coronavirus 2
STDVVYRAF

SEQ ID NO: 26787 - protein, 9 aa, Severe acute respiratory syndrome-related coronavirus
  REGION 1..9: note = Table C
  source 1..9: note = Severe acute respiratory syndrome coronavirus 2
VVYRAFDIY

SEQ ID NO: 26788 - protein, 9 aa, Severe acute respiratory syndrome-related coronavirus
  REGION 1..9: note = Table C
  source 1..9: note = Severe acute respiratory syndrome coronavirus 2
AFDIYNDKV

SEQ ID NO: 26789 - protein, 9 aa, Severe acute respiratory syndrome-related coronavirus
  REGION 1..9: note = Table C
  source 1..9: note = Severe acute respiratory syndrome coronavirus 2
FDIYNDKVA

SEQ ID NO: 26790 - protein, 9 aa, Severe acute respiratory syndrome-related coronavirus
  REGION 1..9: note = Table C
  source 1..9: note = Severe acute respiratory syndrome coronavirus 2
IYNDKVAGF

SEQ ID NO: 26791 - protein, 9 aa, Severe acute respiratory syndrome-related coronavirus
  REGION 1..9: note = Table C
  source 1..9: note = Severe acute respiratory syndrome coronavirus 2
KVAGFAKFL

SEQ ID NO: 26792 - protein, 9 aa, Severe acute respiratory syndrome-related coronavirus
  REGION 1..9: note = Table C
  source 1..9: note = Severe acute respiratory syndrome coronavirus 2
VAGFAKFLK

SEQ ID NO: 26793 - protein, 9 aa, Severe acute respiratory syndrome-related coronavirus
  REGION 1..9: note = Table C
  source 1..9: note = Severe acute respiratory syndrome coronavirus 2
AGFAKFLKT

SEQ ID NO: 26794 - protein, 9 aa, Severe acute respiratory syndrome-related coronavirus
  REGION 1..9: note = Table C
  source 1..9: note = Severe acute respiratory syndrome coronavirus 2
DVTDVTQLY

SEQ ID NO: 26795 - protein, 9 aa, Severe acute respiratory syndrome-related coronavirus
  REGION 1..9: note = Table C
  source 1..9: note = Severe acute respiratory syndrome coronavirus 2
VTDVTQLYL

SEQ ID NO: 26796 - protein, 9 aa, Severe acute respiratory syndrome-related coronavirus
  REGION 1..9: note = Table C
  source 1..9: note = Severe acute respiratory syndrome coronavirus 2
QLYLGGMSY

SEQ ID NO: 26797 - protein, 9 aa, Severe acute respiratory syndrome-related coronavirus
  REGION 1..9: note = Table C
  source 1..9: note = Severe acute respiratory syndrome coronavirus 2
LYLGGMSYY

SEQ ID NO: 26798 - protein, 10 aa, Severe acute respiratory syndrome-related coronavirus
  REGION 1..10: note = Table C
  source 1..10: note = Severe acute respiratory syndrome coronavirus 2
VGDSAEVAVK

SEQ ID NO: 26799 - protein, 10 aa, Severe acute respiratory syndrome-related coronavirus
  REGION 1..10: note = Table C
  source 1..10: note = Severe acute respiratory syndrome coronavirus 2
DSAEVAVKMF

SEQ ID NO: 26800 - protein, 10 aa, Severe acute respiratory syndrome-related coronavirus
  REGION 1..10: note = Table C
  source 1..10: note = Severe acute respiratory syndrome coronavirus 2
AEVAVKMFDA

SEQ ID NO: 26801 - protein, 10 aa, Severe acute respiratory syndrome-related coronavirus
  REGION 1..10: note = Table C
  source 1..10: note = Severe acute respiratory syndrome coronavirus 2
EVAVKMFDAY

SEQ ID NO: 26802 - protein, 10 aa, Severe acute respiratory syndrome-related coronavirus
  REGION 1..10: note = Table C
  source 1..10: note = Severe acute respiratory syndrome coronavirus 2
KMFDAYVNTF

SEQ ID NO: 26803 - protein, 10 aa, Severe acute respiratory syndrome-related coronavirus
  REGION 1..10: note = Table C
  source 1..10: note = Severe acute respiratory syndrome coronavirus 2
AYVNTFSSTF

SEQ ID NO: 26804 - protein, 10 aa, Severe acute respiratory syndrome-related coronavirus
  REGION 1..10: note = Table C
  source 1..10: note = Severe acute respiratory syndrome coronavirus 2
KHTDFSSEII

SEQ ID NO: 26805 - protein, 10 aa, Severe acute respiratory syndrome-related coronavirus
  REGION 1..10: note = Table C
  source 1..10: note = Severe acute respiratory syndrome coronavirus 2
TDFSSEIIGY

SEQ ID NO: 26806 - protein, 10 aa, Severe acute respiratory syndrome-related coronavirus
  REGION 1..10: note = Table C
  source 1..10: note = Severe acute respiratory syndrome coronavirus 2
DFSSEIIGYK

SEQ ID NO: 26807 - protein, 10 aa, Severe acute respiratory syndrome-related coronavirus
  REGION 1..10: note = Table C
  source 1..10: note = Severe acute respiratory syndrome coronavirus 2
FSSEIIGYKA

SEQ ID NO: 26808 - protein, 10 aa, Severe acute respiratory syndrome-related coronavirus
  REGION 1..10: note = Table C
  source 1..10: note = Severe acute respiratory syndrome coronavirus 2
EIIGYKAIDG

SEQ ID NO: 26809 - protein, 10 aa, Severe acute respiratory syndrome-related coronavirus
  REGION 1..10: note = Table C
  source 1..10: note = Severe acute respiratory syndrome coronavirus 2
CTDDNALAYY

SEQ ID NO: 26810 - protein, 10 aa, Severe acute respiratory syndrome-related coronavirus
  REGION 1..10: note = Table C
  source 1..10: note = Severe acute respiratory syndrome coronavirus 2
NALAYYNTTK

SEQ ID NO: 26811 - protein, 10 aa, Severe acute respiratory syndrome-related coronavirus
  REGION 1..10: note = Table C
  source 1..10: note = Severe acute respiratory syndrome coronavirus 2
RAFDIYNDKV

SEQ ID NO: 26812 - protein, 10 aa, Severe acute respiratory syndrome-related coronavirus
  REGION 1..10: note = Table C
  source 1..10: note = Severe acute respiratory syndrome coronavirus 2
DIYNDKVAGF

SEQ ID NO: 26813 - protein, 10 aa, Severe acute respiratory syndrome-related coronavirus
  REGION 1..10: note = Table C
  source 1..10: note = Severe acute respiratory syndrome coronavirus 2
KVAGFAKFLK

SEQ ID NO: 26814 - protein, 10 aa, Severe acute respiratory syndrome-related coronavirus
  REGION 1..10: note = Table C
  source 1..10: note = Severe acute respiratory syndrome coronavirus 2
GCDVTDVTQL

SEQ ID NO: 26815 - protein, 10 aa, Severe acute respiratory syndrome-related coronavirus
  REGION 1..10: note = Table C
  source 1..10: note = Severe acute respiratory syndrome coronavirus 2
DVTDVTQLYL

SEQ ID NO: 26816 - protein, 10 aa, Severe acute respiratory syndrome-related coronavirus
  REGION 1..10: note = Table C
  source 1..10: note = Severe acute respiratory syndrome coronavirus 2
VTDVTQLYLG

SEQ ID NO: 26817 - protein, 10 aa, Severe acute respiratory syndrome-related coronavirus
  REGION 1..10: note = Table C
  source 1..10: note = Severe acute respiratory syndrome coronavirus 2
DVTQLYLGGM

SEQ ID NO: 26818 - protein, 10 aa, Severe acute respiratory syndrome-related coronavirus
  REGION 1..10: note = Table C
  source 1..10: note = Severe acute respiratory syndrome coronavirus 2
TQLYLGGMSY

SEQ ID NO: 26819 - protein, 10 aa, Severe acute respiratory syndrome-related coronavirus
  REGION 1..10: note = Table C
  source 1..10: note = Severe acute respiratory syndrome coronavirus 2
QLYLGGMSYY

SEQ ID NO: 26820 - protein, 11 aa, Severe acute respiratory syndrome-related coronavirus
  REGION 1..11: note = Table C
  source 1..11: note = Severe acute respiratory syndrome coronavirus 2
VGDSAEVAVKM

SEQ ID NO: 26821 - protein, 11 aa, Severe acute respiratory syndrome-related coronavirus
  REGION 1..11: note = Table C
  source 1..11: note = Severe acute respiratory syndrome coronavirus 2
AEVAVKMFDAY

SEQ ID NO: 26822 - protein, 11 aa, Severe acute respiratory syndrome-related coronavirus
  REGION 1..11: note = Table C
  source 1..11: note = Severe acute respiratory syndrome coronavirus 2
EVAVKMFDAYV

SEQ ID NO: 26823 - protein, 11 aa, Severe acute respiratory syndrome-related coronavirus
  REGION 1..11: note = Table C
  source 1..11: note = Severe acute respiratory syndrome coronavirus 2
DAYVNTFSSTF

SEQ ID NO: 26824 - protein, 11 aa, Severe acute respiratory syndrome-related coronavirus
  REGION 1..11: note = Table C
  source 1..11: note = Severe acute respiratory syndrome coronavirus 2
HTDFSSEIIGY

SEQ ID NO: 26825 - protein, 11 aa, Severe acute respiratory syndrome-related coronavirus
  REGION 1..11: note = Table C
  source 1..11: note = Severe acute respiratory syndrome coronavirus 2
TDFSSEIIGYK

SEQ ID NO: 26826 - protein, 11 aa, Severe acute respiratory syndrome-related coronavirus
  REGION 1..11: note = Table C
  source 1..11: note = Severe acute respiratory syndrome coronavirus 2
EIIGYKAIDGG

SEQ ID NO: 26827 - protein, 11 aa, Severe acute respiratory syndrome-related coronavirus
  REGION 1..11: note = Table C
  source 1..11: note = Severe acute respiratory syndrome coronavirus 2
GYKAIDGGVTR

SEQ ID NO: 26828 - protein, 11 aa, Severe acute respiratory syndrome-related coronavirus
  REGION 1..11: note = Table C
  source 1..11: note = Severe acute respiratory syndrome coronavirus 2
TACTDDNALAY

SEQ ID NO: 26829 - protein, 11 aa, Severe acute respiratory syndrome-related coronavirus
  REGION 1..11: note = Table C
  source 1..11: note = Severe acute respiratory syndrome coronavirus 2
IYNDKVAGFAK

SEQ ID NO: 26830 - protein, 11 aa, Severe acute respiratory syndrome-related coronavirus
  REGION 1..11: note = Table C
  source 1..11: note = Severe acute respiratory syndrome coronavirus 2
KVAGFAKFLKT

SEQ ID NO: 26831 - protein, 11 aa, Severe acute respiratory syndrome-related coronavirus
  REGION 1..11: note = Table C
  source 1..11: note = Severe acute respiratory syndrome coronavirus 2
GCDVTDVTQLY

SEQ ID NO: 26832 - protein, 11 aa, Severe acute respiratory syndrome-related coronavirus
  REGION 1..11: note = Table C
  source 1..11: note = Severe acute respiratory syndrome coronavirus 2
DVTDVTQLYLG

SEQ ID NO: 26833 - protein, 11 aa, Severe acute respiratory syndrome-related coronavirus
  REGION 1..11: note = Table C
  source 1..11: note = Severe acute respiratory syndrome coronavirus 2
VTQLYLGGMSY

SEQ ID NO: 26834 - protein, 11 aa, Severe acute respiratory syndrome-related coronavirus
  REGION 1..11: note = Table C
  source 1..11: note = Severe acute respiratory syndrome coronavirus 2
TQLYLGGMSYY

SEQ ID NO: 26835 - protein, 8 aa, Severe acute respiratory syndrome-related coronavirus
  REGION 1..8: note = Table C
  source 1..8: note = Severe acute respiratory syndrome coronavirus 2
LFMRIFTI

SEQ ID NO: 26836 - protein, 8 aa, Severe acute respiratory syndrome-related coronavirus
  REGION 1..8: note = Table C
  source 1..8: note = Severe acute respiratory syndrome coronavirus 2
RIFTIGTV

SEQ ID NO: 26837 - protein, 8 aa, Severe acute respiratory syndrome-related coronavirus
  REGION 1..8: note = Table C
  source 1..8: note = Severe acute respiratory syndrome coronavirus 2
FTIGTVTL

SEQ ID NO: 26838 - protein, 8 aa, Severe acute respiratory syndrome-related coronavirus
  REGION 1..8: note = Table C
  source 1..8: note = Severe acute respiratory syndrome coronavirus 2
TIGTVTLK

SEQ ID NO: 26839 - protein, 8 aa, Severe acute respiratory syndrome-related coronavirus
  REGION 1..8: note = Table C
  source 1..8: note = Severe acute respiratory syndrome coronavirus 2
VTLKQGEI

SEQ ID NO: 26840 - protein, 8 aa, Severe acute respiratory syndrome-related coronavirus
  REGION 1..8: note = Table C
  source 1..8: note = Severe acute respiratory syndrome coronavirus 2
GEIKDATP

SEQ ID NO: 26841 - protein, 8 aa, Severe acute respiratory syndrome-related coronavirus
  REGION 1..8: note = Table C
  source 1..8: note = Severe acute respiratory syndrome coronavirus 2
DATPSDFV

SEQ ID NO: 26842 - protein, 8 aa, Severe acute respiratory syndrome-related coronavirus
  REGION 1..8: note = Table C
  source 1..8: note = Severe acute respiratory syndrome coronavirus 2
TPSDFVRA

SEQ ID NO: 26843 - protein, 8 aa, Severe acute respiratory syndrome-related coronavirus
  REGION 1..8: note = Table C
  source 1..8: note = Severe acute respiratory syndrome coronavirus 2
SDFVRATA

SEQ ID NO: 26844 - protein, 8 aa, Severe acute respiratory syndrome-related coronavirus
  REGION 1..8: note = Table C
  source 1..8: note = Severe acute respiratory syndrome coronavirus 2
FVRATATI

SEQ ID NO: 26845 - protein, 8 aa, Severe acute respiratory syndrome-related coronavirus
  REGION 1..8: note = Table C
  source 1..8: note = Severe acute respiratory syndrome coronavirus 2
TATIPIQA

SEQ ID NO: 26846 - protein, 8 aa, Severe acute respiratory syndrome-related coronavirus
  REGION 1..8: note = Table C
  source 1..8: note = Severe acute respiratory syndrome coronavirus 2
QASLPFGW

SEQ ID NO: 26847 - protein, 8 aa, Severe acute respiratory syndrome-related coronavirus
  REGION 1..8: note = Table C
  source 1..8: note = Severe acute respiratory syndrome coronavirus 2
AVFQSASK

SEQ ID NO: 26848 - protein, 8 aa, Severe acute respiratory syndrome-related coronavirus
  REGION 1..8: note = Table C
  source 1..8: note = Severe acute respiratory syndrome coronavirus 2
VFQSASKI

SEQ ID NO: 26849 - protein, 8 aa, Severe acute respiratory syndrome-related coronavirus
  REGION 1..8: note = Table C
  source 1..8: note = Severe acute respiratory syndrome coronavirus 2
FQSASKII

SEQ ID NO: 26850 - protein, 8 aa, Severe acute respiratory syndrome-related coronavirus
  REGION 1..8: note = Table C
  source 1..8: note = Severe acute respiratory syndrome coronavirus 2
SASKIITL

SEQ ID NO: 26851 - protein, 8 aa, Severe acute respiratory syndrome-related coronavirus
  REGION 1..8: note = Table C
  source 1..8: note = Severe acute respiratory syndrome coronavirus 2
ASKIITLK

SEQ ID NO: 26852 - protein, 8 aa, Severe acute respiratory syndrome-related coronavirus
  REGION 1..8: note = Table C
  source 1..8: note = Severe acute respiratory syndrome coronavirus 2
TLKKRWQL

SEQ ID NO: 26853 - protein, 8 aa, Severe acute respiratory syndrome-related coronavirus
  REGION 1..8: note = Table C
  source 1..8: note = Severe acute respiratory syndrome coronavirus 2
LYLYALVY

SEQ ID NO: 26854 - protein, 8 aa, Severe acute respiratory syndrome-related coronavirus
  REGION 1..8: note = Table C
  source 1..8: note = Severe acute respiratory syndrome coronavirus 2
YFLQSINF

SEQ ID NO: 26855 - protein, 8 aa, Severe acute respiratory syndrome-related coronavirus
  REGION 1..8: note = Table C
  source 1..8: note = Severe acute respiratory syndrome coronavirus 2
FLQSINFV

SEQ ID NO: 26856 - protein, 8 aa, Severe acute respiratory syndrome-related coronavirus
  REGION 1..8: note = Table C
  source 1..8: note = Severe acute respiratory syndrome coronavirus 2
QSINFVRI

SEQ ID NO: 26857 - protein, 8 aa, Severe acute respiratory syndrome-related coronavirus
  REGION 1..8: note = Table C
  source 1..8: note = Severe acute respiratory syndrome coronavirus 2
SINFVRII

SEQ ID NO: 26858 - protein, 8 aa, Severe acute respiratory syndrome-related coronavirus
  REGION 1..8: note = Table C
  source 1..8: note = Severe acute respiratory syndrome coronavirus 2
DCVVLHSY

SEQ ID NO: 26859 - protein, 8 aa, Severe acute respiratory syndrome-related coronavirus
  REGION 1..8: note = Table C
  source 1..8: note = Severe acute respiratory syndrome coronavirus 2
SYFTSDYY

SEQ ID NO: 26860 - protein, 8 aa, Severe acute respiratory syndrome-related coronavirus
  REGION 1..8: note = Table C
  source 1..8: note = Severe acute respiratory syndrome coronavirus 2
TSDYYQLY

SEQ ID NO: 26861 - protein, 8 aa, Severe acute respiratory syndrome-related coronavirus
  REGION 1..8: note = Table C
  source 1..8: note = Severe acute respiratory syndrome coronavirus 2
YQLYSTQL

SEQ ID NO: 26862 - protein, 8 aa, Severe acute respiratory syndrome-related coronavirus
  REGION 1..8: note = Table C
  source 1..8: note = Severe acute respiratory syndrome coronavirus 2
TGVEHVTF

SEQ ID NO: 26863 - protein, 8 aa, Severe acute respiratory syndrome-related coronavirus
  REGION 1..8: note = Table C
  source 1..8: note = Severe acute respiratory syndrome coronavirus 2
VEHVTFFI

SEQ ID NO: 26864 - protein, 8 aa, Severe acute respiratory syndrome-related coronavirus
  REGION 1..8: note = Table C
  source 1..8: note = Severe acute respiratory syndrome coronavirus 2
EHVTFFIY

SEQ ID NO: 26865 - protein, 8 aa, Severe acute respiratory syndrome-related coronavirus
  REGION 1..8: note = Table C
  source 1..8: note = Severe acute respiratory syndrome coronavirus 2
VTFFIYNK

SEQ ID NO: 26866 - protein, 8 aa, Severe acute respiratory syndrome-related coronavirus
  REGION 1..8: note = Table C
  source 1..8: note = Severe acute respiratory syndrome coronavirus 2
EHVQIHTI

SEQ ID NO: 26867 - protein, 8 aa, Severe acute respiratory syndrome-related coronavirus
  REGION 1..8: note = Table C
  source 1..8: note = Severe acute respiratory syndrome coronavirus 2
TIDGSSGV

SEQ ID NO: 26868 - protein, 9 aa, Severe acute respiratory syndrome-related coronavirus
  REGION 1..9: note = Table C
  source 1..9: note = Severe acute respiratory syndrome coronavirus 2
DLFMRIFTI

SEQ ID NO: 26869 - protein, 9 aa, Severe acute respiratory syndrome-related coronavirus
  REGION 1..9: note = Table C
  source 1..9: note = Severe acute respiratory syndrome coronavirus 2
MRIFTIGTV

SEQ ID NO: 26870 - protein, 9 aa, Severe acute respiratory syndrome-related coronavirus
  REGION 1..9: note = Table C
  source 1..9: note = Severe acute respiratory syndrome coronavirus 2
IFTIGTVTL

SEQ ID NO: 26871 - protein, 9 aa, Severe acute respiratory syndrome-related coronavirus
  REGION 1..9: note = Table C
  source 1..9: note = Severe acute respiratory syndrome coronavirus 2
FTIGTVTLK

SEQ ID NO: 26872 - protein, 9 aa, Severe acute respiratory syndrome-related coronavirus
  REGION 1..9: note = Table C
  source 1..9: note = Severe acute respiratory syndrome coronavirus 2
VTLKQGEIK

SEQ ID NO: 26873 - protein, 9 aa, Severe acute respiratory syndrome-related coronavirus
  REGION 1..9: note = Table C
  source 1..9: note = Severe acute respiratory syndrome coronavirus 2
GEIKDATPS

SEQ ID NO: 26874 - protein, 9 aa, Severe acute respiratory syndrome-related coronavirus
  REGION 1..9: note = Table C
  source 1..9: note = Severe acute respiratory syndrome coronavirus 2
IKDATPSDF

SEQ ID NO: 26875 - protein, 9 aa, Severe acute respiratory syndrome-related coronavirus
  REGION 1..9: note = Table C
  source 1..9: note = Severe acute respiratory syndrome coronavirus 2
DATPSDFVR

SEQ ID NO: 26876 - protein, 9 aa, Severe acute respiratory syndrome-related coronavirus
  REGION 1..9: note = Table C
  source 1..9: note = Severe acute respiratory syndrome coronavirus 2
ATPSDFVRA

SEQ ID NO: 26877 - protein, 9 aa, Severe acute respiratory syndrome-related coronavirus
  REGION 1..9: note = Table C
  source 1..9: note = Severe acute respiratory syndrome coronavirus 2
TPSDFVRAT

SEQ ID NO: 26878 - protein, 9 aa, Severe acute respiratory syndrome-related coronavirus
  REGION 1..9: note = Table C
  source 1..9: note = Severe acute respiratory syndrome coronavirus 2
SDFVRATAT

SEQ ID NO: 26879 - protein, 9 aa, Severe acute respiratory syndrome-related coronavirus
  REGION 1..9: note = Table C
  source 1..9: note = Severe acute respiratory syndrome coronavirus 2
DFVRATATI

SEQ ID NO: 26880 - protein, 9 aa, Severe acute respiratory syndrome-related coronavirus
  REGION 1..9: note = Table C
  source 1..9: note = Severe acute respiratory syndrome coronavirus 2
ATATIPIQA

SEQ ID NO: 26881 - protein, 9 aa, Severe acute respiratory syndrome-related coronavirus
  REGION 1..9: note = Table C
  source 1..9: note = Severe acute respiratory syndrome coronavirus 2
ATIPIQASL

SEQ ID NO: 26882 - protein, 9 aa, Severe acute respiratory syndrome-related coronavirus
  REGION 1..9: note = Table C
  source 1..9: note = Severe acute respiratory syndrome coronavirus 2
IPIQASLPF

SEQ ID NO: 26883 - protein, 9 aa, Severe acute respiratory syndrome-related coronavirus
  REGION 1..9: note = Table C
  source 1..9: note = Severe acute respiratory syndrome coronavirus 2
IQASLPFGW

SEQ ID NO: 26884 - protein, 9 aa, Severe acute respiratory syndrome-related coronavirus
  REGION 1..9: note = Table C
  source 1..9: note = Severe acute respiratory syndrome coronavirus 2
ASLPFGWLI

SEQ ID NO: 26885 - protein, 9 aa, Severe acute respiratory syndrome-related coronavirus
  REGION 1..9: note = Table C
  source 1..9: note = Severe acute respiratory syndrome coronavirus 2
LAVFQSASK

SEQ ID NO: 26886 - protein, 9 aa, Severe acute respiratory syndrome-related coronavirus
  REGION 1..9: note = Table C
  source 1..9: note = Severe acute respiratory syndrome coronavirus 2
AVFQSASKI

SEQ ID NO: 26887 - protein, 9 aa, Severe acute respiratory syndrome-related coronavirus
  REGION 1..9: note = Table C
  source 1..9: note = Severe acute respiratory syndrome coronavirus 2
VFQSASKII

SEQ ID NO: 26888 - protein, 9 aa, Severe acute respiratory syndrome-related coronavirus
  REGION 1..9: note = Table C
  source 1..9: note = Severe acute respiratory syndrome coronavirus 2
QSASKIITL

SEQ ID NO: 26889 - protein, 9 aa, Severe acute respiratory syndrome-related coronavirus
  REGION 1..9: note = Table C
  source 1..9: note = Severe acute respiratory syndrome coronavirus 2
SASKIITLK

SEQ ID NO: 26890 - protein, 9 aa, Severe acute respiratory syndrome-related coronavirus
  REGION 1..9: note = Table C
  source 1..9: note = Severe acute respiratory syndrome coronavirus 2
ASKIITLKK

SEQ ID NO: 26891 - protein, 9 aa, Severe acute respiratory syndrome-related coronavirus
  REGION 1..9: note = Table C
  source 1..9: note = Severe acute respiratory syndrome coronavirus 2
KIITLKKRW

SEQ ID NO: 26892 - protein, 9 aa, Severe acute respiratory syndrome-related coronavirus
  REGION 1..9: note = Table C
  source 1..9: note = Severe acute respiratory syndrome coronavirus 2
ITLKKRWQL

SEQ ID NO: 26893 - protein, 9 aa, Severe acute respiratory syndrome-related coronavirus
  REGION 1..9: note = Table C
  source 1..9: note = Severe acute respiratory syndrome coronavirus 2
KRWQLALSK

SEQ ID NO: 26894 - protein, 9 aa, Severe acute respiratory syndrome-related coronavirus
  REGION 1..9: note = Table C
  source 1..9: note = Severe acute respiratory syndrome coronavirus 2
WQLALSKGV

SEQ ID NO: 26895 - protein, 9 aa, Severe acute respiratory syndrome-related coronavirus
  REGION 1..9: note = Table C
  source 1..9: note = Severe acute respiratory syndrome coronavirus 2
LALSKGVHF

SEQ ID NO: 26896 - protein, 9 aa, Severe acute respiratory syndrome-related coronavirus
  REGION 1..9: note = Table C
  source 1..9: note = Severe acute respiratory syndrome coronavirus 2
ALSKGVHFV

SEQ ID NO: 26897 - protein, 9 aa, Severe acute respiratory syndrome-related coronavirus
  REGION 1..9: note = Table C
  source 1..9: note = Severe acute respiratory syndrome coronavirus 2
VHFVCNLLL

SEQ ID NO: 26898 - protein, 9 aa, Severe acute respiratory syndrome-related coronavirus
  REGION 1..9: note = Table C
  source 1..9: note = Severe acute respiratory syndrome coronavirus 2
YLYALVYFL

SEQ ID NO: 26899 - protein, 9 aa, Severe acute respiratory syndrome-related coronavirus
  REGION 1..9: note = Table C
  source 1..9: note = Severe acute respiratory syndrome coronavirus 2
ALVYFLQSI

SEQ ID NO: 26900 - protein, 9 aa, Severe acute respiratory syndrome-related coronavirus
  REGION 1..9: note = Table C
  source 1..9: note = Severe acute respiratory syndrome coronavirus 2
VYFLQSINF

SEQ ID NO: 26901 - protein, 9 aa, Severe acute respiratory syndrome-related coronavirus
  REGION 1..9: note = Table C
  source 1..9: note = Severe acute respiratory syndrome coronavirus 2
YFLQSINFV

SEQ ID NO: 26902 - protein, 9 aa, Severe acute respiratory syndrome-related coronavirus
  REGION 1..9: note = Table C
  source 1..9: note = Severe acute respiratory syndrome coronavirus 2
FLQSINFVR

SEQ ID NO: 26903 - protein, 9 aa, Severe acute respiratory syndrome-related coronavirus
  REGION 1..9: note = Table C
  source 1..9: note = Severe acute respiratory syndrome coronavirus 2
LQSINFVRI

SEQ ID NO: 26904 - protein, 9 aa, Severe acute respiratory syndrome-related coronavirus
  REGION 1..9: note = Table C
  source 1..9: note = Severe acute respiratory syndrome coronavirus 2
QSINFVRII

SEQ ID NO: 26905 - protein, 9 aa, Severe acute respiratory syndrome-related coronavirus
  REGION 1..9: note = Table C
  source 1..9: note = Severe acute respiratory syndrome coronavirus 2
SINFVRIIM

SEQ ID NO: 26906 - protein, 9 aa, Severe acute respiratory syndrome-related coronavirus
  REGION 1..9: note = Table C
  source 1..9: note = Severe acute respiratory syndrome coronavirus 2
HSYFTSDYY

SEQ ID NO: 26907 - protein, 9 aa, Severe acute respiratory syndrome-related coronavirus
  REGION 1..9: note = Table C
  source 1..9: note = Severe acute respiratory syndrome coronavirus 2
YFTSDYYQL

SEQ ID NO: 26908 - protein, 9 aa, Severe acute respiratory syndrome-related coronavirus
  REGION 1..9: note = Table C
  source 1..9: note = Severe acute respiratory syndrome coronavirus 2
FTSDYYQLY

SEQ ID NO: 26909 - protein, 9 aa, Severe acute respiratory syndrome-related coronavirus
  REGION 1..9: note = Table C
  source 1..9: note = Severe acute respiratory syndrome coronavirus 2
YYQLYSTQL

SEQ ID NO: 26910 - protein, 9 aa, Severe acute respiratory syndrome-related coronavirus
  REGION 1..9: note = Table C
  source 1..9: note = Severe acute respiratory syndrome coronavirus 2
QLYSTQLST

SEQ ID NO: 26911 - protein, 9 aa, Severe acute respiratory syndrome-related coronavirus
  REGION 1..9: note = Table C
  source 1..9: note = Severe acute respiratory syndrome coronavirus 2
TQLSTDTGV

SEQ ID NO: 26912 - protein, 9 aa, Severe acute respiratory syndrome-related coronavirus
  REGION 1..9: note = Table C
  source 1..9: note = Severe acute respiratory syndrome coronavirus 2
LSTDTGVEH

SEQ ID NO: 26913 - protein, 9 aa, Severe acute respiratory syndrome-related coronavirus
  REGION 1..9: note = Table C
  source 1..9: note = Severe acute respiratory syndrome coronavirus 2
STDTGVEHV

SEQ ID NO: 26914 - protein, 9 aa, Severe acute respiratory syndrome-related coronavirus
  REGION 1..9: note = Table C
  source 1..9: note = Severe acute respiratory syndrome coronavirus 2
DTGVEHVTF

SEQ ID NO: 26915 - protein, 9 aa, Severe acute respiratory syndrome-related coronavirus
  REGION 1..9: note = Table C
  source 1..9: note = Severe acute respiratory syndrome coronavirus 2
TGVEHVTFF

SEQ ID NO: 26916 - protein, 9 aa, Severe acute respiratory syndrome-related coronavirus
  REGION 1..9: note = Table C
  source 1..9: note = Severe acute respiratory syndrome coronavirus 2
VEHVTFFIY

SEQ ID NO: 26917 - protein, 9 aa, Severe acute respiratory syndrome-related coronavirus
  REGION 1..9: note = Table C
  source 1..9: note = Severe acute respiratory syndrome coronavirus 2
HVTFFIYNK

SEQ ID NO: 26918 - protein, 9 aa, Severe acute respiratory syndrome-related coronavirus
  REGION 1..9: note = Table C
  source 1..9: note = Severe acute respiratory syndrome coronavirus 2
VTFFIYNKI

SEQ ID NO: 26919 - protein, 9 aa, Severe acute respiratory syndrome-related coronavirus
  REGION 1..9: note = Table C
  source 1..9: note = Severe acute respiratory syndrome coronavirus 2
IVDEPEEHV

SEQ ID NO: 26920 - protein, 9 aa, Severe acute respiratory syndrome-related coronavirus
  REGION 1..9: note = Table C
  source 1..9: note = Severe acute respiratory syndrome coronavirus 2
DEPEEHVQI

SEQ ID NO: 26921 - protein, 9 aa, Severe acute respiratory syndrome-related coronavirus
  REGION 1..9: note = Table C
  source 1..9: note = Severe acute respiratory syndrome coronavirus 2
EPEEHVQIH

SEQ ID NO: 26922 - protein, 9 aa, Severe acute respiratory syndrome-related coronavirus
  REGION 1..9: note = Table C
  source 1..9: note = Severe acute respiratory syndrome coronavirus 2
EEHVQIHTI

SEQ ID NO: 26923 - protein, 9 aa, Severe acute respiratory syndrome-related coronavirus
  REGION 1..9: note = Table C
  source 1..9: note = Severe acute respiratory syndrome coronavirus 2
HTIDGSSGV

SEQ ID NO: 26924 - protein, 10 aa, Severe acute respiratory syndrome-related coronavirus
  REGION 1..10: note = Table C
  source 1..10: note = Severe acute respiratory syndrome coronavirus 2
FMRIFTIGTV

SEQ ID NO: 26925 - protein, 10 aa, Severe acute respiratory syndrome-related coronavirus
  REGION 1..10: note = Table C
  source 1..10: note = Severe acute respiratory syndrome coronavirus 2
RIFTIGTVTL

SEQ ID NO: 26926 - protein, 10 aa, Severe acute respiratory syndrome-related coronavirus
  REGION 1..10: note = Table C
  source 1..10: note = Severe acute respiratory syndrome coronavirus 2
FTIGTVTLKQ

SEQ ID NO: 26927 - protein, 10 aa, Severe acute respiratory syndrome-related coronavirus
  REGION 1..10: note = Table C
  source 1..10: note = Severe acute respiratory syndrome coronavirus 2
GTVTLKQGEI

SEQ ID NO: 26928 - protein, 10 aa, Severe acute respiratory syndrome-related coronavirus
  REGION 1..10: note = Table C
  source 1..10: note = Severe acute respiratory syndrome coronavirus 2
TLKQGEIKDA

SEQ ID NO: 26929 - protein, 10 aa, Severe acute respiratory syndrome-related coronavirus
  REGION 1..10: note = Table C
  source 1..10: note = Severe acute respiratory syndrome coronavirus 2
EIKDATPSDF

SEQ ID NO: 26930 - protein, 10 aa, Severe acute respiratory syndrome-related coronavirus
  REGION 1..10: note = Table C
  source 1..10: note = Severe acute respiratory syndrome coronavirus 2
DATPSDFVRA

SEQ ID NO: 26931 - protein, 10 aa, Severe acute respiratory syndrome-related coronavirus
  REGION 1..10: note = Table C
  source 1..10: note = Severe acute respiratory syndrome coronavirus 2
TPSDFVRATA

SEQ ID NO: 26932 - protein, 10 aa, Severe acute respiratory syndrome-related coronavirus
  REGION 1..10: note = Table C
  source 1..10: note = Severe acute respiratory syndrome coronavirus 2
RATATIPIQA

SEQ ID NO: 26933 - protein, 10 aa, Severe acute respiratory syndrome-related coronavirus
  REGION 1..10: note = Table C
  source 1..10: note = Severe acute respiratory syndrome coronavirus 2
FQSASKIITL

SEQ ID NO: 26934 - protein, 10 aa, Severe acute respiratory syndrome-related coronavirus
  REGION 1..10: note = Table C
  source 1..10: note = Severe acute respiratory syndrome coronavirus 2
QSASKIITLK

SEQ ID NO: 26935 - protein, 10 aa, Severe acute respiratory syndrome-related coronavirus
  REGION 1..10: note = Table C
  source 1..10: note = Severe acute respiratory syndrome coronavirus 2
SASKIITLKK

SEQ ID NO: 26936 - protein, 10 aa, Severe acute respiratory syndrome-related coronavirus
  REGION 1..10: note = Table C
  source 1..10: note = Severe acute respiratory syndrome coronavirus 2
FLQSINFVRI

SEQ ID NO: 26937 - protein, 10 aa, Severe acute respiratory syndrome-related coronavirus
  REGION 1..10: note = Table C
  source 1..10: note = Severe acute respiratory syndrome coronavirus 2
SINFVRIIMR

SEQ ID NO: 26938 - protein, 10 aa, Severe acute respiratory syndrome-related coronavirus
  REGION 1..10: note = Table C
  source 1..10: note = Severe acute respiratory syndrome coronavirus 2
LHSYFTSDYY

SEQ ID NO: 26939 - protein, 10 aa, Severe acute respiratory syndrome-related coronavirus
  REGION 1..10: note = Table C
  source 1..10: note = Severe acute respiratory syndrome coronavirus 2
SYFTSDYYQL

SEQ ID NO: 26940 - protein, 10 aa, Severe acute respiratory syndrome-related coronavirus
  REGION 1..10: note = Table C
  source 1..10: note = Severe acute respiratory syndrome coronavirus 2
YFTSDYYQLY

SEQ ID NO: 26941 - protein, 10 aa, Severe acute respiratory syndrome-related coronavirus
  REGION 1..10: note = Table C
  source 1..10: note = Severe acute respiratory syndrome coronavirus 2
DYYQLYSTQL

SEQ ID NO: 26942 - protein, 10 aa, Severe acute respiratory syndrome-related coronavirus
  REGION 1..10: note = Table C
  source 1..10: note = Severe acute respiratory syndrome coronavirus 2
LSTDTGVEHV

SEQ ID NO: 26943 - protein, 10 aa, Severe acute respiratory syndrome-related coronavirus
  REGION 1..10: note = Table C
  source 1..10: note = Severe acute respiratory syndrome coronavirus 2
TDTGVEHVTF

SEQ ID NO: 26944 - protein, 10 aa, Severe acute respiratory syndrome-related coronavirus
  REGION 1..10: note = Table C
  source 1..10: note = Severe acute respiratory syndrome coronavirus 2
KIVDEPEEHV

SEQ ID NO: 26945 - protein, 10 aa, Severe acute respiratory syndrome-related coronavirus
  REGION 1..10: note = Table C
  source 1..10: note = Severe acute respiratory syndrome coronavirus 2
EHVQIHTIDG

SEQ ID NO: 26946 - protein, 11 aa, Severe acute respiratory syndrome-related coronavirus
  REGION 1..11: note = Table C
  source 1..11: note = Severe acute respiratory syndrome coronavirus 2
MRIFTIGTVTL

SEQ ID NO: 26947 - protein, 11 aa, Severe acute respiratory syndrome-related coronavirus
  REGION 1..11: note = Table C
  source 1..11: note = Severe acute respiratory syndrome coronavirus 2
RIFTIGTVTLK

SEQ ID NO: 26948 - protein, 11 aa, Severe acute respiratory syndrome-related coronavirus
  REGION 1..11: note = Table C
  source 1..11: note = Severe acute respiratory syndrome coronavirus 2
FTIGTVTLKQG

SEQ ID NO: 26949 - protein, 11 aa, Severe acute respiratory syndrome-related coronavirus
  REGION 1..11: note = Table C
  source 1..11: note = Severe acute respiratory syndrome coronavirus 2
GEIKDATPSDF

SEQ ID NO: 26950 - protein, 11 aa, Severe acute respiratory syndrome-related coronavirus
  REGION 1..11: note = Table C
  source 1..11: note = Severe acute respiratory syndrome coronavirus 2
EIKDATPSDFV

SEQ ID NO: 26951 - protein, 11 aa, Severe acute respiratory syndrome-related coronavirus
  REGION 1..11: note = Table C
  source 1..11: note = Severe acute respiratory syndrome coronavirus 2
TPSDFVRATAT

SEQ ID NO: 26952 - protein, 11 aa, Severe acute respiratory syndrome-related coronavirus
  REGION 1..11: note = Table C
  source 1..11: note = Severe acute respiratory syndrome coronavirus 2
IPIQASLPFGW

SEQ ID NO: 26953 - protein, 11 aa, Severe acute respiratory syndrome-related coronavirus
  REGION 1..11: note = Table C
  source 1..11: note = Severe acute respiratory syndrome coronavirus 2
VFQSASKIITL

SEQ ID NO: 26954 - protein, 11 aa, Severe acute respiratory syndrome-related coronavirus
  REGION 1..11: note = Table C
  source 1..11: note = Severe acute respiratory syndrome coronavirus 2
KIITLKKRWQL

SEQ ID NO: 26955 - protein, 11 aa, Severe acute respiratory syndrome-related coronavirus
  REGION 1..11: note = Table C
  source 1..11: note = Severe acute respiratory syndrome coronavirus 2
YFLQSINFVRI

SEQ ID NO: 26956 - protein, 11 aa, Severe acute respiratory syndrome-related coronavirus
  REGION 1..11: note = Table C
  source 1..11: note = Severe acute respiratory syndrome coronavirus 2
QSINFVRIIMR

SEQ ID NO: 26957 - protein, 11 aa, Severe acute respiratory syndrome-related coronavirus
  REGION 1..11: note = Table C
  source 1..11: note = Severe acute respiratory syndrome coronavirus 2
VLHSYFTSDYY

SEQ ID NO: 26958 - protein, 11 aa, Severe acute respiratory syndrome-related coronavirus
  REGION 1..11: note = Table C
  source 1..11: note = Severe acute respiratory syndrome coronavirus 2
SYFTSDYYQLY

SEQ ID NO: 26959 - protein, 11 aa, Severe acute respiratory syndrome-related coronavirus
  REGION 1..11: note = Table C
  source 1..11: note = Severe acute respiratory syndrome coronavirus 2
QLSTDTGVEHV

SEQ ID NO: 26960 - protein, 11 aa, Severe acute respiratory syndrome-related coronavirus
  REGION 1..11: note = Table C
  source 1..11: note = Severe acute respiratory syndrome coronavirus 2
STDTGVEHVTF

SEQ ID NO: 26961 - protein, 11 aa, Severe acute respiratory syndrome-related coronavirus
  REGION 1..11: note = Table C
  source 1..11: note = Severe acute respiratory syndrome coronavirus 2
EHVTFFIYNKI

SEQ ID NO: 26962 - protein, 11 aa, Severe acute respiratory syndrome-related coronavirus
  REGION 1..11: note = Table C
  source 1..11: note = Severe acute respiratory syndrome coronavirus 2
IVDEPEEHVQI

SEQ ID NO: 26963 - protein, 8 aa, Severe acute respiratory syndrome-related coronavirus
  REGION 1..8: note = Table C
  source 1..8: note = Severe acute respiratory syndrome coronavirus 2
IVNVSLVK

SEQ ID NO: 26964 - protein, 8 aa, Severe acute respiratory syndrome-related coronavirus
  REGION 1..8: note = Table C
  source 1..8: note = Severe acute respiratory syndrome coronavirus 2
VSLVKPSF

SEQ ID NO: 26965 - protein, 8 aa, Severe acute respiratory syndrome-related coronavirus
  REGION 1..8: note = Table C
  source 1..8: note = Severe acute respiratory syndrome coronavirus 2
LVKPSFYV

SEQ ID NO: 26966 - protein, 8 aa, Severe acute respiratory syndrome-related coronavirus
  REGION 1..8: note = Table C
  source 1..8: note = Severe acute respiratory syndrome coronavirus 2
VKPSFYVY

SEQ ID NO: 26967 - protein, 9 aa, Severe acute respiratory syndrome-related coronavirus
  REGION 1..9: note = Table C
  source 1..9: note = Severe acute respiratory syndrome coronavirus 2
NIVNVSLVK

SEQ ID NO: 26968 - protein, 9 aa, Severe acute respiratory syndrome-related coronavirus
  REGION 1..9: note = Table C
  source 1..9: note = Severe acute respiratory syndrome coronavirus 2
NVSLVKPSF

SEQ ID NO: 26969 - protein, 9 aa, Severe acute respiratory syndrome-related coronavirus
  REGION 1..9: note = Table C
  source 1..9: note = Severe acute respiratory syndrome coronavirus 2
VSLVKPSFY

SEQ ID NO: 26970 - protein, 9 aa, Severe acute respiratory syndrome-related coronavirus
  REGION 1..9: note = Table C
  source 1..9: note = Severe acute respiratory syndrome coronavirus 2
SLVKPSFYV

SEQ ID NO: 26971 - protein, 9 aa, Severe acute respiratory syndrome-related coronavirus
  REGION 1..9: note = Table C
  source 1..9: note = Severe acute respiratory syndrome coronavirus 2
LVKPSFYVY

SEQ ID NO: 26972 - protein, 9 aa, Severe acute respiratory syndrome-related coronavirus
  REGION 1..9: note = Table C
  source 1..9: note = Severe acute respiratory syndrome coronavirus 2
PSFYVYSRV

SEQ ID NO: 26973 - protein, 9 aa, Severe acute respiratory syndrome-related coronavirus
  REGION 1..9: note = Table C
  source 1..9: note = Severe acute respiratory syndrome coronavirus 2
SFYVYSRVK

SEQ ID NO: 26974 - protein, 9 aa, Severe acute respiratory syndrome-related coronavirus
  REGION 1..9: note = Table C
  source 1..9: note = Severe acute respiratory syndrome coronavirus 2
YVYSRVKNL

SEQ ID NO: 26975 - protein, 9 aa, Severe acute respiratory syndrome-related coronavirus
  REGION 1..9: note = Table C
  source 1..9: note = Severe acute respiratory syndrome coronavirus 2
RVKNLNSSR

SEQ ID NO: 26976 - protein, 10 aa, Severe acute respiratory syndrome-related coronavirus
  REGION 1..10: note = Table C
  source 1..10: note = Severe acute respiratory syndrome coronavirus 2
SLVKPSFYVY

SEQ ID NO: 26977 - protein, 10 aa, Severe acute respiratory syndrome-related coronavirus
  REGION 1..10: note = Table C
  source 1..10: note = Severe acute respiratory syndrome coronavirus 2
SRVKNLNSSR

SEQ ID NO: 26978 - protein, 10 aa, Severe acute respiratory syndrome-related coronavirus
  REGION 1..10: note = Table C
  source 1..10: note = Severe acute respiratory syndrome coronavirus 2
RVKNLNSSRV

SEQ ID NO: 26979 - protein, 11 aa, Severe acute respiratory syndrome-related coronavirus
  REGION 1..11: note = Table C
  source 1..11: note = Severe acute respiratory syndrome coronavirus 2
IVNVSLVKPSF

SEQ ID NO: 26980 - protein, 11 aa, Severe acute respiratory syndrome-related coronavirus
  REGION 1..11: note = Table C
  source 1..11: note = Severe acute respiratory syndrome coronavirus 2
LVKPSFYVYSR

SEQ ID NO: 26981 - protein, 8 aa, Severe acute respiratory syndrome-related coronavirus
  REGION 1..8: note = Table C
  source 1..8: note = Severe acute respiratory syndrome coronavirus 2
FAYANRNR

SEQ ID NO: 26982 - protein, 8 aa, Severe acute respiratory syndrome-related coronavirus
  REGION 1..8: note = Table C
  source 1..8: note = Severe acute respiratory syndrome coronavirus 2
YANRNRFL

SEQ ID NO: 26983 - protein, 8 aa, Severe acute respiratory syndrome-related coronavirus
  REGION 1..8: note = Table C
  source 1..8: note = Severe acute respiratory syndrome coronavirus 2
FLYIIKLI

SEQ ID NO: 26984 - protein, 8 aa, Severe acute respiratory syndrome-related coronavirus
  REGION 1..8: note = Table C
  source 1..8: note = Severe acute respiratory syndrome coronavirus 2
YIIKLIFL

SEQ ID NO: 26985 - protein, 8 aa, Severe acute respiratory syndrome-related coronavirus
  REGION 1..8: note = Table C
  source 1..8: note = Severe acute respiratory syndrome coronavirus 2
LMWLSYFI

SEQ ID NO: 26986 - protein, 8 aa, Severe acute respiratory syndrome-related coronavirus
  REGION 1..8: note = Table C
  source 1..8: note = Severe acute respiratory syndrome coronavirus 2
SYFIASFR

SEQ ID NO: 26987 - protein, 8 aa, Severe acute respiratory syndrome-related coronavirus
  REGION 1..8: note = Table C
  source 1..8: note = Severe acute respiratory syndrome coronavirus 2
YFIASFRL

SEQ ID NO: 26988 - protein, 8 aa, Severe acute respiratory syndrome-related coronavirus
  REGION 1..8: note = Table C
  source 1..8: note = Severe acute respiratory syndrome coronavirus 2
FIASFRLF

SEQ ID NO: 26989 - protein, 8 aa, Severe acute respiratory syndrome-related coronavirus
  REGION 1..8: note = Table C
  source 1..8: note = Severe acute respiratory syndrome coronavirus 2
ASFRLFAR

SEQ ID NO: 26990 - protein, 8 aa, Severe acute respiratory syndrome-related coronavirus
  REGION 1..8: note = Table C
  source 1..8: note = Severe acute respiratory syndrome coronavirus 2
RTRSMWSF

SEQ ID NO: 26991 - protein, 8 aa, Severe acute respiratory syndrome-related coronavirus
  REGION 1..8: note = Table C
  source 1..8: note = Severe acute respiratory syndrome coronavirus 2
VPLHGTIL

SEQ ID NO: 26992 - protein, 8 aa, Severe acute respiratory syndrome-related coronavirus
  REGION 1..8: note = Table C
  source 1..8: note = Severe acute respiratory syndrome coronavirus 2
TILTRPLL

SEQ ID NO: 26993 - protein, 8 aa, Severe acute respiratory syndrome-related coronavirus
  REGION 1..8: note = Table C
  source 1..8: note = Severe acute respiratory syndrome coronavirus 2
RPLLESEL

SEQ ID NO: 26994 - protein, 8 aa, Severe acute respiratory syndrome-related coronavirus
  REGION 1..8: note = Table C
  source 1..8: note = Severe acute respiratory syndrome coronavirus 2
TSRTLSYY

SEQ ID NO: 26995 - protein, 8 aa, Severe acute respiratory syndrome-related coronavirus
  REGION 1..8: note = Table C
  source 1..8: note = Severe acute respiratory syndrome coronavirus 2
RTLSYYKL

SEQ ID NO: 26996 - protein, 8 aa, Severe acute respiratory syndrome-related coronavirus
  REGION 1..8: note = Table C
  source 1..8: note = Severe acute respiratory syndrome coronavirus 2
KLGASQRV

SEQ ID NO: 26997 - protein, 8 aa, Severe acute respiratory syndrome-related coronavirus
  REGION 1..8: note = Table C
  source 1..8: note = Severe acute respiratory syndrome coronavirus 2
GDSGFAAY

SEQ ID NO: 26998 - protein, 8 aa, Severe acute respiratory syndrome-related coronavirus
  REGION 1..8: note = Table C
  source 1..8: note = Severe acute respiratory syndrome coronavirus 2
FAAYSRYR

SEQ ID NO: 26999 - protein, 9 aa, Severe acute respiratory syndrome-related coronavirus
  REGION 1..9: note = Table C
  source 1..9: note = Severe acute respiratory syndrome coronavirus 2
LLQFAYANR

SEQ ID NO: 27000 - protein, 9 aa, Severe acute respiratory syndrome-related coronavirus
  REGION 1..9: note = Table C
  source 1..9: note = Severe acute respiratory syndrome coronavirus 2
QFAYANRNR

SEQ ID NO: 27001 - protein, 9 aa, Severe acute respiratory syndrome-related coronavirus
  REGION 1..9: note = Table C
  source 1..9: note = Severe acute respiratory syndrome coronavirus 2
FAYANRNRF

SEQ ID NO: 27002 - protein, 9 aa, Severe acute respiratory syndrome-related coronavirus
  REGION 1..9: note = Table C
  source 1..9: note = Severe acute respiratory syndrome coronavirus 2
AYANRNRFL

SEQ ID NO: 27003 - protein, 9 aa, Severe acute respiratory syndrome-related coronavirus
  REGION 1..9: note = Table C
  source 1..9: note = Severe acute respiratory syndrome coronavirus 2
YANRNRFLY

SEQ ID NO: 27004 - protein, 9 aa, Severe acute respiratory syndrome-related coronavirus
  REGION 1..9: note = Table C
  source 1..9: note = Severe acute respiratory syndrome coronavirus 2
ANRNRFLYI

SEQ ID NO: 27005 - protein, 9 aa, Severe acute respiratory syndrome-related coronavirus
  REGION 1..9: note = Table C
  source 1..9: note = Severe acute respiratory syndrome coronavirus 2
NRFLYIIKL

SEQ ID NO: 27006 - protein, 9 aa, Severe acute respiratory syndrome-related coronavirus
  REGION 1..9: note = Table C
  source 1..9: note = Severe acute respiratory syndrome coronavirus 2
RFLYIIKLI

SEQ ID NO: 27007 - protein, 9 aa, Severe acute respiratory syndrome-related coronavirus
  REGION 1..9: note = Table C
  source 1..9: note = Severe acute respiratory syndrome coronavirus 2
LYIIKLIFL

SEQ ID NO: 27008 - protein, 9 aa, Severe acute respiratory syndrome-related coronavirus
  REGION 1..9: note = Table C
  source 1..9: note = Severe acute respiratory syndrome coronavirus 2
YIIKLIFLW

SEQ ID NO: 27009 - protein, 9 aa, Severe acute respiratory syndrome-related coronavirus
  REGION 1..9: note = Table C
  source 1..9: note = Severe acute respiratory syndrome coronavirus 2
LVGLMWLSY

SEQ ID NO: 27010 - protein, 9 aa, Severe acute respiratory syndrome-related coronavirus
  REGION 1..9: note = Table C
  source 1..9: note = Severe acute respiratory syndrome coronavirus 2
WLSYFIASF

SEQ ID NO: 27011 - protein, 9 aa, Severe acute respiratory syndrome-related coronavirus
  REGION 1..9: note = Table C
  source 1..9: note = Severe acute respiratory syndrome coronavirus 2
LSYFIASFR

SEQ ID NO: 27012 - protein, 9 aa, Severe acute respiratory syndrome-related coronavirus
  REGION 1..9: note = Table C
  source 1..9: note = Severe acute respiratory syndrome coronavirus 2
SYFIASFRL

SEQ ID NO: 27013 - protein, 9 aa, Severe acute respiratory syndrome-related coronavirus
  REGION 1..9: note = Table C
  source 1..9: note = Severe acute respiratory syndrome coronavirus 2
YFIASFRLF

SEQ ID NO: 27014 - protein, 9 aa, Severe acute respiratory syndrome-related coronavirus
  REGION 1..9: note = Table C
  source 1..9: note = Severe acute respiratory syndrome coronavirus 2
IASFRLFAR

SEQ ID NO: 27015 - protein, 9 aa, Severe acute respiratory syndrome-related coronavirus
  REGION 1..9: note = Table C
  source 1..9: note = Severe acute respiratory syndrome coronavirus 2
ASFRLFART

SEQ ID NO: 27016 - protein, 9 aa, Severe acute respiratory syndrome-related coronavirus
  REGION 1..9: note = Table C
  source 1..9: note = Severe acute respiratory syndrome coronavirus 2
SFRLFARTR

SEQ ID NO: 27017 - protein, 9 aa, Severe acute respiratory syndrome-related coronavirus
  REGION 1..9: note = Table C
  source 1..9: note = Severe acute respiratory syndrome coronavirus 2
RLFARTRSM

SEQ ID NO: 27018 - protein, 9 aa, Severe acute respiratory syndrome-related coronavirus
  REGION 1..9: note = Table C
  source 1..9: note = Severe acute respiratory syndrome coronavirus 2
LFARTRSMW

SEQ ID NO: 27019 - protein, 9 aa, Severe acute respiratory syndrome-related coronavirus
  REGION 1..9: note = Table C
  source 1..9: note = Severe acute respiratory syndrome coronavirus 2
ARTRSMWSF

SEQ ID NO: 27020 - protein, 9 aa, Severe acute respiratory syndrome-related coronavirus
  REGION 1..9: note = Table C
  source 1..9: note = Severe acute respiratory syndrome coronavirus 2
SMWSFNPET

SEQ ID NO: 27021 - protein, 9 aa, Severe acute respiratory syndrome-related coronavirus
  REGION 1..9: note = Table C
  source 1..9: note = Severe acute respiratory syndrome coronavirus 2
SFNPETNIL

SEQ ID NO: 27022 - protein, 9 aa, Severe acute respiratory syndrome-related coronavirus
  REGION 1..9: note = Table C
  source 1..9: note = Severe acute respiratory syndrome coronavirus 2
PETNILLNV

SEQ ID NO: 27023 - protein, 9 aa, Severe acute respiratory syndrome-related coronavirus
  REGION 1..9: note = Table C
  source 1..9: note = Severe acute respiratory syndrome coronavirus 2
ILLNVPLHG

SEQ ID NO: 27024 - protein, 9 aa, Severe acute respiratory syndrome-related coronavirus
  REGION 1..9: note = Table C
  source 1..9: note = Severe acute respiratory syndrome coronavirus 2
LLNVPLHGT

SEQ ID NO: 27025 - protein, 9 aa, Severe acute respiratory syndrome-related coronavirus
  REGION 1..9: note = Table C
  source 1..9: note = Severe acute respiratory syndrome coronavirus 2
NVPLHGTIL

SEQ ID NO: 27026 - protein, 9 aa, Severe acute respiratory syndrome-related coronavirus
  REGION 1..9: note = Table C
  source 1..9: note = Severe acute respiratory syndrome coronavirus 2
VPLHGTILT

SEQ ID NO: 27027 - protein, 9 aa, Severe acute respiratory syndrome-related coronavirus
  REGION 1..9: note = Table C
  source 1..9: note = Severe acute respiratory syndrome coronavirus 2
PLHGTILTR

SEQ ID NO: 27028 - protein, 9 aa, Severe acute respiratory syndrome-related coronavirus
  REGION 1..9: note = Table C
  source 1..9: note = Severe acute respiratory syndrome coronavirus 2
GTILTRPLL

SEQ ID NO: 27029 - protein, 9 aa, Severe acute respiratory syndrome-related coronavirus
  REGION 1..9: note = Table C
  source 1..9: note = Severe acute respiratory syndrome coronavirus 2
TRPLLESEL

SEQ ID NO: 27030 - protein, 9 aa, Severe acute respiratory syndrome-related coronavirus
  REGION 1..9: note = Table C
  source 1..9: note = Severe acute respiratory syndrome coronavirus 2
RPLLESELV

SEQ ID NO: 27031 - protein, 9 aa, Severe acute respiratory syndrome-related coronavirus
  REGION 1..9: note = Table C
  source 1..9: note = Severe acute respiratory syndrome coronavirus 2
TSRTLSYYK

SEQ ID NO: 27032 - protein, 9 aa, Severe acute respiratory syndrome-related coronavirus
  REGION 1..9: note = Table C
  source 1..9: note = Severe acute respiratory syndrome coronavirus 2
SRTLSYYKL

SEQ ID NO: 27033 - protein, 9 aa, Severe acute respiratory syndrome-related coronavirus
  REGION 1..9: note = Table C
  source 1..9: note = Severe acute respiratory syndrome coronavirus 2
RTLSYYKLG

SEQ ID NO: 27034 - protein, 9 aa, Severe acute respiratory syndrome-related coronavirus
  REGION 1..9: note = Table C
  source 1..9: note = Severe acute respiratory syndrome coronavirus 2
YYKLGASQR

SEQ ID NO: 27035 - protein, 9 aa, Severe acute respiratory syndrome-related coronavirus
  REGION 1..9: note = Table C
  source 1..9: note = Severe acute respiratory syndrome coronavirus 2
QRVAGDSGF

SEQ ID NO: 27036 - protein, 9 aa, Severe acute respiratory syndrome-related coronavirus
  REGION 1..9: note = Table C
  source 1..9: note = Severe acute respiratory syndrome coronavirus 2
RVAGDSGFA

SEQ ID NO: 27037 - protein, 9 aa, Severe acute respiratory syndrome-related coronavirus
  REGION 1..9: note = Table C
  source 1..9: note = Severe acute respiratory syndrome coronavirus 2
VAGDSGFAA

SEQ ID NO: 27038 - protein, 9 aa, Severe acute respiratory syndrome-related coronavirus
  REGION 1..9: note = Table C
  source 1..9: note = Severe acute respiratory syndrome coronavirus 2
AGDSGFAAY

SEQ ID NO: 27039 - protein, 9 aa, Severe acute respiratory syndrome-related coronavirus
  REGION 1..9: note = Table C
  source 1..9: note = Severe acute respiratory syndrome coronavirus 2
DSGFAAYSR

SEQ ID NO: 27040 - protein, 9 aa, Severe acute respiratory syndrome-related coronavirus
  REGION 1..9: note = Table C
  source 1..9: note = Severe acute respiratory syndrome coronavirus 2
SGFAAYSRY

SEQ ID NO: 27041 - protein, 9 aa, Severe acute respiratory syndrome-related coronavirus
  REGION 1..9: note = Table C
  source 1..9: note = Severe acute respiratory syndrome coronavirus 2
YSRYRIGNY

SEQ ID NO: 27042 - protein, 10 aa, Severe acute respiratory syndrome-related coronavirus
  REGION 1..10: note = Table C
  source 1..10: note = Severe acute respiratory syndrome coronavirus 2
QFAYANRNRF

SEQ ID NO: 27043 - protein, 10 aa, Severe acute respiratory syndrome-related coronavirus
  REGION 1..10: note = Table C
  source 1..10: note = Severe acute respiratory syndrome coronavirus 2
FAYANRNRFL

SEQ ID NO: 27044 - protein, 10 aa, Severe acute respiratory syndrome-related coronavirus
  REGION 1..10: note = Table C
  source 1..10: note = Severe acute respiratory syndrome coronavirus 2
AYANRNRFLY

SEQ ID NO: 27045 - protein, 10 aa, Severe acute respiratory syndrome-related coronavirus
  REGION 1..10: note = Table C
  source 1..10: note = Severe acute respiratory syndrome coronavirus 2
RFLYIIKLIF

SEQ ID NO: 27046 - protein, 10 aa, Severe acute respiratory syndrome-related coronavirus
  REGION 1..10: note = Table C
  source 1..10: note = Severe acute respiratory syndrome coronavirus 2
FLYIIKLIFL

SEQ ID NO: 27047 - protein, 10 aa, Severe acute respiratory syndrome-related coronavirus
  REGION 1..10: note = Table C
  source 1..10: note = Severe acute respiratory syndrome coronavirus 2
LYIIKLIFLW

SEQ ID NO: 27048 - protein, 10 aa, Severe acute respiratory syndrome-related coronavirus
  REGION 1..10: note = Table C
  source 1..10: note = Severe acute respiratory syndrome coronavirus 2
MWLSYFIASF

SEQ ID NO: 27049 - protein, 10 aa, Severe acute respiratory syndrome-related coronavirus
  REGION 1..10: note = Table C
  source 1..10: note = Severe acute respiratory syndrome coronavirus 2
SYFIASFRLF

SEQ ID NO: 27050 - protein, 10 aa, Severe acute respiratory syndrome-related coronavirus
  REGION 1..10: note = Table C
  source 1..10: note = Severe acute respiratory syndrome coronavirus 2
YFIASFRLFA

SEQ ID NO: 27051 - protein, 10 aa, Severe acute respiratory syndrome-related coronavirus
  REGION 1..10: note = Table C
  source 1..10: note = Severe acute respiratory syndrome coronavirus 2
FIASFRLFAR

SEQ ID NO: 27052 - protein, 10 aa, Severe acute respiratory syndrome-related coronavirus
  REGION 1..10: note = Table C
  source 1..10: note = Severe acute respiratory syndrome coronavirus 2
ASFRLFARTR

SEQ ID NO: 27053 - protein, 10 aa, Severe acute respiratory syndrome-related coronavirus
  REGION 1..10: note = Table C
  source 1..10: note = Severe acute respiratory syndrome coronavirus 2
RLFARTRSMW

SEQ ID NO: 27054 - protein, 10 aa, Severe acute respiratory syndrome-related coronavirus
  REGION 1..10: note = Table C
  source 1..10: note = Severe acute respiratory syndrome coronavirus 2
ILLNVPLHGT

SEQ ID NO: 27055 - protein, 10 aa, Severe acute respiratory syndrome-related coronavirus
  REGION 1..10: note = Table C
  source 1..10: note = Severe acute respiratory syndrome coronavirus 2
VPLHGTILTR

SEQ ID NO: 27056 - protein, 10 aa, Severe acute respiratory syndrome-related coronavirus
  REGION 1..10: note = Table C
  source 1..10: note = Severe acute respiratory syndrome coronavirus 2
LTRPLLESEL

SEQ ID NO: 27057 - protein, 10 aa, Severe acute respiratory syndrome-related coronavirus
  REGION 1..10: note = Table C
  source 1..10: note = Severe acute respiratory syndrome coronavirus 2
RPLLESELVI

SEQ ID NO: 27058 - protein, 10 aa, Severe acute respiratory syndrome-related coronavirus
  REGION 1..10: note = Table C
  source 1..10: note = Severe acute respiratory syndrome coronavirus 2
SYYKLGASQR

SEQ ID NO: 27059 - protein, 10 aa, Severe acute respiratory syndrome-related coronavirus
  REGION 1..10: note = Table C
  source 1..10: note = Severe acute respiratory syndrome coronavirus 2
SQRVAGDSGF

SEQ ID NO: 27060 - protein, 10 aa, Severe acute respiratory syndrome-related coronavirus
  REGION 1..10: note = Table C
  source 1..10: note = Severe acute respiratory syndrome coronavirus 2
RVAGDSGFAA

SEQ ID NO: 27061 - protein, 10 aa, Severe acute respiratory syndrome-related coronavirus
  REGION 1..10: note = Table C
  source 1..10: note = Severe acute respiratory syndrome coronavirus 2
VAGDSGFAAY

SEQ ID NO: 27062 - protein, 10 aa, Severe acute respiratory syndrome-related coronavirus
  REGION 1..10: note = Table C
  source 1..10: note = Severe acute respiratory syndrome coronavirus 2
GDSGFAAYSR

SEQ ID NO: 27063 - protein, 10 aa, Severe acute respiratory syndrome-related coronavirus
  REGION 1..10: note = Table C
  source 1..10: note = Severe acute respiratory syndrome coronavirus 2
DSGFAAYSRY

SEQ ID NO: 27064 - protein, 10 aa, Severe acute respiratory syndrome-related coronavirus
  REGION 1..10: note = Table C
  source 1..10: note = Severe acute respiratory syndrome coronavirus 2
AYSRYRIGNY

SEQ ID NO: 27065 - protein, 11 aa, Severe acute respiratory syndrome-related coronavirus
  REGION 1..11: note = Table C
  source 1..11: note = Severe acute respiratory syndrome coronavirus 2
LLQFAYANRNR

SEQ ID NO: 27066 - protein, 11 aa, Severe acute respiratory syndrome-related coronavirus
  REGION 1..11: note = Table C
  source 1..11: note = Severe acute respiratory syndrome coronavirus 2
FAYANRNRFLY

SEQ ID NO: 27067 - protein, 11 aa, Severe acute respiratory syndrome-related coronavirus
  REGION 1..11: note = Table C
  source 1..11: note = Severe acute respiratory syndrome coronavirus 2
AYANRNRFLYI

SEQ ID NO: 27068 - protein, 11 aa, Severe acute respiratory syndrome-related coronavirus
  REGION 1..11: note = Table C
  source 1..11: note = Severe acute respiratory syndrome coronavirus 2
LSYFIASFRLF

SEQ ID NO: 27069 - protein, 11 aa, Severe acute respiratory syndrome-related coronavirus
  REGION 1..11: note = Table C
  source 1..11: note = Severe acute respiratory syndrome coronavirus 2
SMWSFNPETNI

SEQ ID NO: 27070 - protein, 11 aa, Severe acute respiratory syndrome-related coronavirus
  REGION 1..11: note = Table C
  source 1..11: note = Severe acute respiratory syndrome coronavirus 2
WSFNPETNILL

SEQ ID NO: 27071 - protein, 11 aa, Severe acute respiratory syndrome-related coronavirus
  REGION 1..11: note = Table C
  source 1..11: note = Severe acute respiratory syndrome coronavirus 2
NVPLHGTILTR

SEQ ID NO: 27072 - protein, 11 aa, Severe acute respiratory syndrome-related coronavirus
  REGION 1..11: note = Table C
  source 1..11: note = Severe acute respiratory syndrome coronavirus 2
LSYYKLGASQR

SEQ ID NO: 27073 - protein, 11 aa, Severe acute respiratory syndrome-related coronavirus
  REGION 1..11: note = Table C
  source 1..11: note = Severe acute respiratory syndrome coronavirus 2
ASQRVAGDSGF

SEQ ID NO: 27074 - protein, 11 aa, Severe acute respiratory syndrome-related coronavirus
  REGION 1..11: note = Table C
  source 1..11: note = Severe acute respiratory syndrome coronavirus 2
QRVAGDSGFAA

SEQ ID NO: 27075 - protein, 11 aa, Severe acute respiratory syndrome-related coronavirus
  REGION 1..11: note = Table C
  source 1..11: note = Severe acute respiratory syndrome coronavirus 2
RVAGDSGFAAY

SEQ ID NO: 27076 - protein, 11 aa, Severe acute respiratory syndrome-related coronavirus
  REGION 1..11: note = Table C
  source 1..11: note = Severe acute respiratory syndrome coronavirus 2
GDSGFAAYSRY

SEQ ID NO: 27077 - protein, 11 aa, Severe acute respiratory syndrome-related coronavirus
  REGION 1..11: note = Table C
  source 1..11: note = Severe acute respiratory syndrome coronavirus 2
DSGFAAYSRYR

SEQ ID NO: 27078 - protein, 11 aa, Severe acute respiratory syndrome-related coronavirus
  REGION 1..11: note = Table C
  source 1..11: note = Severe acute respiratory syndrome coronavirus 2
AAYSRYRIGNY

SEQ ID NO: 27079 - protein, 8 aa, Severe acute respiratory syndrome-related coronavirus
  REGION 1..8: note = Table C
  source 1..8: note = Severe acute respiratory syndrome coronavirus 2
SPDDQIGY

SEQ ID NO: 27080 - protein, 8 aa, Severe acute respiratory syndrome-related coronavirus
  REGION 1..8: note = Table C
  source 1..8: note = Severe acute respiratory syndrome coronavirus 2
PDDQIGYY

SEQ ID NO: 27081 - protein, 8 aa, Severe acute respiratory syndrome-related coronavirus
  REGION 1..8: note = Table C
  source 1..8: note = Severe acute respiratory syndrome coronavirus 2
DDQIGYYR

SEQ ID NO: 27082 - protein, 8 aa, Severe acute respiratory syndrome-related coronavirus
  REGION 1..8: note = Table C
  source 1..8: note = Severe acute respiratory syndrome coronavirus 2
NAAIVLQL

SEQ ID NO: 27083 - protein, 8 aa, Severe acute respiratory syndrome-related coronavirus
  REGION 1..8: note = Table C
  source 1..8: note = Severe acute respiratory syndrome coronavirus 2
QLPQGTTL

SEQ ID NO: 27084 - protein, 8 aa, Severe acute respiratory syndrome-related coronavirus
  REGION 1..8: note = Table C
  source 1..8: note = Severe acute respiratory syndrome coronavirus 2
PQGTTLPK

SEQ ID NO: 27085 - protein, 8 aa, Severe acute respiratory syndrome-related coronavirus
  REGION 1..8: note = Table C
  source 1..8: note = Severe acute respiratory syndrome coronavirus 2
TATKAYNV

SEQ ID NO: 27086 - protein, 8 aa, Severe acute respiratory syndrome-related coronavirus
  REGION 1..8: note = Table C
  source 1..8: note = Severe acute respiratory syndrome coronavirus 2
AYNVTQAF

SEQ ID NO: 27087 - protein, 8 aa, Severe acute respiratory syndrome-related coronavirus
  REGION 1..8: note = Table C
  source 1..8: note = Severe acute respiratory syndrome coronavirus 2
NVTQAFGR

SEQ ID NO: 27088 - protein, 8 aa, Severe acute respiratory syndrome-related coronavirus
  REGION 1..8: note = Table C
  source 1..8: note = Severe acute respiratory syndrome coronavirus 2
FAPSASAF

SEQ ID NO: 27089 - protein, 8 aa, Severe acute respiratory syndrome-related coronavirus
  REGION 1..8: note = Table C
  source 1..8: note = Severe acute respiratory syndrome coronavirus 2
APSASAFF

SEQ ID NO: 27090 - protein, 8 aa, Severe acute respiratory syndrome-related coronavirus
  REGION 1..8: note = Table C
  source 1..8: note = Severe acute respiratory syndrome coronavirus 2
SAFFGMSR

SEQ ID NO: 27091 - protein, 8 aa, Severe acute respiratory syndrome-related coronavirus
  REGION 1..8: note = Table C
  source 1..8: note = Severe acute respiratory syndrome coronavirus 2
AFFGMSRI

SEQ ID NO: 27092 - protein, 8 aa, Severe acute respiratory syndrome-related coronavirus
  REGION 1..8: note = Table C
  source 1..8: note = Severe acute respiratory syndrome coronavirus 2
FGMSRIGM

SEQ ID NO: 27093 - protein, 8 aa, Severe acute respiratory syndrome-related coronavirus
  REGION 1..8: note = Table C
  source 1..8: note = Severe acute respiratory syndrome coronavirus 2
MSRIGMEV

SEQ ID NO: 27094 - protein, 8 aa, Severe acute respiratory syndrome-related coronavirus
  REGION 1..8: note = Table C
  source 1..8: note = Severe acute respiratory syndrome coronavirus 2
EVTPSGTW

SEQ ID NO: 27095 - protein, 8 aa, Severe acute respiratory syndrome-related coronavirus
  REGION 1..8: note = Table C
  source 1..8: note = Severe acute respiratory syndrome coronavirus 2
VTPSGTWL

SEQ ID NO: 27096 - protein, 8 aa, Severe acute respiratory syndrome-related coronavirus
  REGION 1..8: note = Table C
  source 1..8: note = Severe acute respiratory syndrome coronavirus 2
TYTGAIKL

SEQ ID NO: 27097 - protein, 8 aa, Severe acute respiratory syndrome-related coronavirus
  REGION 1..8: note = Table C
  source 1..8: note = Severe acute respiratory syndrome coronavirus 2
LNKHIDAY

SEQ ID NO: 27098 - protein, 8 aa, Severe acute respiratory syndrome-related coronavirus
  REGION 1..8: note = Table C
  source 1..8: note = Severe acute respiratory syndrome coronavirus 2
KTFPPTEP

SEQ ID NO: 27099 - protein, 8 aa, Severe acute respiratory syndrome-related coronavirus
  REGION 1..8: note = Table C
  source 1..8: note = Severe acute respiratory syndrome coronavirus 2
KADETQAL

SEQ ID NO: 27100 - protein, 8 aa, Severe acute respiratory syndrome-related coronavirus
  REGION 1..8: note = Table C
  source 1..8: note = Severe acute respiratory syndrome coronavirus 2
ETQALPQR

SEQ ID NO: 27101 - protein, 8 aa, Severe acute respiratory syndrome-related coronavirus
  REGION 1..8: note = Table C
  source 1..8: note = Severe acute respiratory syndrome coronavirus 2
QALPQRQK

SEQ ID NO: 27102 - protein, 8 aa, Severe acute respiratory syndrome-related coronavirus
  REGION 1..8: note = Table C
  source 1..8: note = Severe acute respiratory syndrome coronavirus 2
RQKKQQTV

SEQ ID NO: 27103 - protein, 9 aa, Severe acute respiratory syndrome-related coronavirus
  REGION 1..9: note = Table C
  source 1..9: note = Severe acute respiratory syndrome coronavirus 2
SPDDQIGYY

SEQ ID NO: 27104 - protein, 9 aa, Severe acute respiratory syndrome-related coronavirus
  REGION 1..9: note = Table C
  source 1..9: note = Severe acute respiratory syndrome coronavirus 2
DDQIGYYRR

SEQ ID NO: 27105 - protein, 9 aa, Severe acute respiratory syndrome-related coronavirus
  REGION 1..9: note = Table C
  source 1..9: note = Severe acute respiratory syndrome coronavirus 2
PANNAAIVL

SEQ ID NO: 27106 - protein, 9 aa, Severe acute respiratory syndrome-related coronavirus
  REGION 1..9: note = Table C
  source 1..9: note = Severe acute respiratory syndrome coronavirus 2
NNAAIVLQL

SEQ ID NO: 27107 - protein, 9 aa, Severe acute respiratory syndrome-related coronavirus
  REGION 1..9: note = Table C
  source 1..9: note = Severe acute respiratory syndrome coronavirus 2
LQLPQGTTL

SEQ ID NO: 27108 - protein, 9 aa, Severe acute respiratory syndrome-related coronavirus
  REGION 1..9: note = Table C
  source 1..9: note = Severe acute respiratory syndrome coronavirus 2
LPQGTTLPK

SEQ ID NO: 27109 - protein, 9 aa, Severe acute respiratory syndrome-related coronavirus
  REGION 1..9: note = Table C
  source 1..9: note = Severe acute respiratory syndrome coronavirus 2
GTTLPKGFY

SEQ ID NO: 27110 - protein, 9 aa, Severe acute respiratory syndrome-related coronavirus
  REGION 1..9: note = Table C
  source 1..9: note = Severe acute respiratory syndrome coronavirus 2
TTLPKGFYA

SEQ ID NO: 27111 - protein, 9 aa, Severe acute respiratory syndrome-related coronavirus
  REGION 1..9: note = Table C
  source 1..9: note = Severe acute respiratory syndrome coronavirus 2
LPKGFYAEG

SEQ ID NO: 27112 - protein, 9 aa, Severe acute respiratory syndrome-related coronavirus
  REGION 1..9: note = Table C
  source 1..9: note = Severe acute respiratory syndrome coronavirus 2
QKRTATKAY

SEQ ID NO: 27113 - protein, 9 aa, Severe acute respiratory syndrome-related coronavirus
  REGION 1..9: note = Table C
  source 1..9: note = Severe acute respiratory syndrome coronavirus 2
RTATKAYNV

SEQ ID NO: 27114 - protein, 9 aa, Severe acute respiratory syndrome-related coronavirus
  REGION 1..9: note = Table C
  source 1..9: note = Severe acute respiratory syndrome coronavirus 2
ATKAYNVTQ

SEQ ID NO: 27115 - protein, 9 aa, Severe acute respiratory syndrome-related coronavirus
  REGION 1..9: note = Table C
  source 1..9: note = Severe acute respiratory syndrome coronavirus 2
TKAYNVTQA

SEQ ID NO: 27116 - protein, 9 aa, Severe acute respiratory syndrome-related coronavirus
  REGION 1..9: note = Table C
  source 1..9: note = Severe acute respiratory syndrome coronavirus 2
KAYNVTQAF

SEQ ID NO: 27117 - protein, 9 aa, Severe acute respiratory syndrome-related coronavirus
  REGION 1..9: note = Table C
  source 1..9: note = Severe acute respiratory syndrome coronavirus 2
YNVTQAFGR

SEQ ID NO: 27118 - protein, 9 aa, Severe acute respiratory syndrome-related coronavirus
  REGION 1..9: note = Table C
  source 1..9: note = Severe acute respiratory syndrome coronavirus 2
NVTQAFGRR

SEQ ID NO: 27119 - protein, 9 aa, Severe acute respiratory syndrome-related coronavirus
  REGION 1..9: note = Table C
  source 1..9: note = Severe acute respiratory syndrome coronavirus 2
QIAQFAPSA

SEQ ID NO: 27120 - protein, 9 aa, Severe acute respiratory syndrome-related coronavirus
  REGION 1..9: note = Table C
  source 1..9: note = Severe acute respiratory syndrome coronavirus 2
AQFAPSASA

SEQ ID NO: 27121 - protein, 9 aa, Severe acute respiratory syndrome-related coronavirus
  REGION 1..9: note = Table C
  source 1..9: note = Severe acute respiratory syndrome coronavirus 2
QFAPSASAF

SEQ ID NO: 27122 - protein, 9 aa, Severe acute respiratory syndrome-related coronavirus
  REGION 1..9: note = Table C
  source 1..9: note = Severe acute respiratory syndrome coronavirus 2
FAPSASAFF

SEQ ID NO: 27123 - protein, 9 aa, Severe acute respiratory syndrome-related coronavirus
  REGION 1..9: note = Table C
  source 1..9: note = Severe acute respiratory syndrome coronavirus 2
ASAFFGMSR

SEQ ID NO: 27124 - protein, 9 aa, Severe acute respiratory syndrome-related coronavirus
  REGION 1..9: note = Table C
  source 1..9: note = Severe acute respiratory syndrome coronavirus 2
SAFFGMSRI

SEQ ID NO: 27125 - protein, 9 aa, Severe acute respiratory syndrome-related coronavirus
  REGION 1..9: note = Table C
  source 1..9: note = Severe acute respiratory syndrome coronavirus 2
FFGMSRIGM

SEQ ID NO: 27126 - protein, 9 aa, Severe acute respiratory syndrome-related coronavirus
  REGION 1..9: note = Table C
  source 1..9: note = Severe acute respiratory syndrome coronavirus 2
GMSRIGMEV

SEQ ID NO: 27127 - protein, 9 aa, Severe acute respiratory syndrome-related coronavirus
  REGION 1..9: note = Table C
  source 1..9: note = Severe acute respiratory syndrome coronavirus 2
SRIGMEVTP

SEQ ID NO: 27128 - protein, 9 aa, Severe acute respiratory syndrome-related coronavirus
  REGION 1..9: note = Table C
  source 1..9: note = Severe acute respiratory syndrome coronavirus 2
MEVTPSGTW

SEQ ID NO: 27129 - protein, 9 aa, Severe acute respiratory syndrome-related coronavirus
  REGION 1..9: note = Table C
  source 1..9: note = Severe acute respiratory syndrome coronavirus 2
EVTPSGTWL

SEQ ID NO: 27130 - protein, 9 aa, Severe acute respiratory syndrome-related coronavirus
  REGION 1..9: note = Table C
  source 1..9: note = Severe acute respiratory syndrome coronavirus 2
TPSGTWLTY

SEQ ID NO: 27131 - protein, 9 aa, Severe acute respiratory syndrome-related coronavirus
  REGION 1..9: note = Table C
  source 1..9: note = Severe acute respiratory syndrome coronavirus 2
LTYTGAIKL

SEQ ID NO: 27132 - protein, 9 aa, Severe acute respiratory syndrome-related coronavirus
  REGION 1..9: note = Table C
  source 1..9: note = Severe acute respiratory syndrome coronavirus 2
LLNKHIDAY

SEQ ID NO: 27133 - protein, 9 aa, Severe acute respiratory syndrome-related coronavirus
  REGION 1..9: note = Table C
  source 1..9: note = Severe acute respiratory syndrome coronavirus 2
KHIDAYKTF

SEQ ID NO: 27134 - protein, 9 aa, Severe acute respiratory syndrome-related coronavirus
  REGION 1..9: note = Table C
  source 1..9: note = Severe acute respiratory syndrome coronavirus 2
KTFPPTEPK

SEQ ID NO: 27135 - protein, 9 aa, Severe acute respiratory syndrome-related coronavirus
  REGION 1..9: note = Table C
  source 1..9: note = Severe acute respiratory syndrome coronavirus 2
KKADETQAL

SEQ ID NO: 27136 - protein, 9 aa, Severe acute respiratory syndrome-related coronavirus
  REGION 1..9: note = Table C
  source 1..9: note = Severe acute respiratory syndrome coronavirus 2
DETQALPQR

SEQ ID NO: 27137 - protein, 9 aa, Severe acute respiratory syndrome-related coronavirus
  REGION 1..9: note = Table C
  source 1..9: note = Severe acute respiratory syndrome coronavirus 2
ETQALPQRQ

SEQ ID NO: 27138 - protein, 9 aa, Severe acute respiratory syndrome-related coronavirus
  REGION 1..9: note = Table C
  source 1..9: note = Severe acute respiratory syndrome coronavirus 2
TQALPQRQK

SEQ ID NO: 27139 - protein, 9 aa, Severe acute respiratory syndrome-related coronavirus
  REGION 1..9: note = Table C
  source 1..9: note = Severe acute respiratory syndrome coronavirus 2
QALPQRQKK

SEQ ID NO: 27140 - protein, 10 aa, Severe acute respiratory syndrome-related coronavirus
  REGION 1..10: note = Table C
  source 1..10: note = Severe acute respiratory syndrome coronavirus 2
NSSPDDQIGY

SEQ ID NO: 27141 - protein, 10 aa, Severe acute respiratory syndrome-related coronavirus
  REGION 1..10: note = Table C
  source 1..10: note = Severe acute respiratory syndrome coronavirus 2
SSPDDQIGYY

SEQ ID NO: 27142 - protein, 10 aa, Severe acute respiratory syndrome-related coronavirus
  REGION 1..10: note = Table C
  source 1..10: note = Severe acute respiratory syndrome coronavirus 2
SPDDQIGYYR

SEQ ID NO: 27143 - protein, 10 aa, Severe acute respiratory syndrome-related coronavirus
  REGION 1..10: note = Table C
  source 1..10: note = Severe acute respiratory syndrome coronavirus 2
VLQLPQGTTL

SEQ ID NO: 27144 - protein, 10 aa, Severe acute respiratory syndrome-related coronavirus
  REGION 1..10: note = Table C
  source 1..10: note = Severe acute respiratory syndrome coronavirus 2
QLPQGTTLPK

SEQ ID NO: 27145 - protein, 10 aa, Severe acute respiratory syndrome-related coronavirus
  REGION 1..10: note = Table C
  source 1..10: note = Severe acute respiratory syndrome coronavirus 2
QGTTLPKGFY

SEQ ID NO: 27146 - protein, 10 aa, Severe acute respiratory syndrome-related coronavirus
  REGION 1..10: note = Table C
  source 1..10: note = Severe acute respiratory syndrome coronavirus 2
TLPKGFYAEG

SEQ ID NO: 27147 - protein, 10 aa, Severe acute respiratory syndrome-related coronavirus
  REGION 1..10: note = Table C
  source 1..10: note = Severe acute respiratory syndrome coronavirus 2
RQKRTATKAY

SEQ ID NO: 27148 - protein, 10 aa, Severe acute respiratory syndrome-related coronavirus
  REGION 1..10: note = Table C
  source 1..10: note = Severe acute respiratory syndrome coronavirus 2
ATKAYNVTQA

SEQ ID NO: 27149 - protein, 10 aa, Severe acute respiratory syndrome-related coronavirus
  REGION 1..10: note = Table C
  source 1..10: note = Severe acute respiratory syndrome coronavirus 2
TKAYNVTQAF

SEQ ID NO: 27150 - protein, 10 aa, Severe acute respiratory syndrome-related coronavirus
  REGION 1..10: note = Table C
  source 1..10: note = Severe acute respiratory syndrome coronavirus 2
KAYNVTQAFG

SEQ ID NO: 27151 - protein, 10 aa, Severe acute respiratory syndrome-related coronavirus
  REGION 1..10: note = Table C
  source 1..10: note = Severe acute respiratory syndrome coronavirus 2
AYNVTQAFGR

SEQ ID NO: 27152 - protein, 10 aa, Severe acute respiratory syndrome-related coronavirus
  REGION 1..10: note = Table C
  source 1..10: note = Severe acute respiratory syndrome coronavirus 2
YNVTQAFGRR

SEQ ID NO: 27153 - protein, 10 aa, Severe acute respiratory syndrome-related coronavirus
  REGION 1..10: note = Table C
  source 1..10: note = Severe acute respiratory syndrome coronavirus 2
AQFAPSASAF

SEQ ID NO: 27154 - protein, 10 aa, Severe acute respiratory syndrome-related coronavirus
  REGION 1..10: note = Table C
  source 1..10: note = Severe acute respiratory syndrome coronavirus 2
QFAPSASAFF

SEQ ID NO: 27155 - protein, 10 aa, Severe acute respiratory syndrome-related coronavirus
  REGION 1..10: note = Table C
  source 1..10: note = Severe acute respiratory syndrome coronavirus 2
APSASAFFGM

SEQ ID NO: 27156 - protein, 10 aa, Severe acute respiratory syndrome-related coronavirus
  REGION 1..10: note = Table C
  source 1..10: note = Severe acute respiratory syndrome coronavirus 2
SASAFFGMSR

SEQ ID NO: 27157 - protein, 10 aa, Severe acute respiratory syndrome-related coronavirus
  REGION 1..10: note = Table C
  source 1..10: note = Severe acute respiratory syndrome coronavirus 2
AFFGMSRIGM

SEQ ID NO: 27158 - protein, 10 aa, Severe acute respiratory syndrome-related coronavirus
  REGION 1..10: note = Table C
  source 1..10: note = Severe acute respiratory syndrome coronavirus 2
FGMSRIGMEV

SEQ ID NO: 27159 - protein, 10 aa, Severe acute respiratory syndrome-related coronavirus
  REGION 1..10: note = Table C
  source 1..10: note = Severe acute respiratory syndrome coronavirus 2
MEVTPSGTWL

SEQ ID NO: 27160 - protein, 10 aa, Severe acute respiratory syndrome-related coronavirus
  REGION 1..10: note = Table C
  source 1..10: note = Severe acute respiratory syndrome coronavirus 2
VTPSGTWLTY

SEQ ID NO: 27161 - protein, 10 aa, Severe acute respiratory syndrome-related coronavirus
  REGION 1..10: note = Table C
  source 1..10: note = Severe acute respiratory syndrome coronavirus 2
KTFPPTEPKK

SEQ ID NO: 27162 - protein, 10 aa, Severe acute respiratory syndrome-related coronavirus
  REGION 1..10: note = Table C
  source 1..10: note = Severe acute respiratory syndrome coronavirus 2
KADETQALPQ

SEQ ID NO: 27163 - protein, 10 aa, Severe acute respiratory syndrome-related coronavirus
  REGION 1..10: note = Table C
  source 1..10: note = Severe acute respiratory syndrome coronavirus 2
ETQALPQRQK

SEQ ID NO: 27164 - protein, 11 aa, Severe acute respiratory syndrome-related coronavirus
  REGION 1..11: note = Table C
  source 1..11: note = Severe acute respiratory syndrome coronavirus 2
NSSPDDQIGYY

SEQ ID NO: 27165 - protein, 11 aa, Severe acute respiratory syndrome-related coronavirus
  REGION 1..11: note = Table C
  source 1..11: note = Severe acute respiratory syndrome coronavirus 2
SSPDDQIGYYR

SEQ ID NO: 27166 - protein, 11 aa, Severe acute respiratory syndrome-related coronavirus
  REGION 1..11: note = Table C
  source 1..11: note = Severe acute respiratory syndrome coronavirus 2
IVLQLPQGTTL

SEQ ID NO: 27167 - protein, 11 aa, Severe acute respiratory syndrome-related coronavirus
  REGION 1..11: note = Table C
  source 1..11: note = Severe acute respiratory syndrome coronavirus 2
LQLPQGTTLPK

SEQ ID NO: 27168 - protein, 11 aa, Severe acute respiratory syndrome-related coronavirus
  REGION 1..11: note = Table C
  source 1..11: note = Severe acute respiratory syndrome coronavirus 2
TTLPKGFYAEG

SEQ ID NO: 27169 - protein, 11 aa, Severe acute respiratory syndrome-related coronavirus
  REGION 1..11: note = Table C
  source 1..11: note = Severe acute respiratory syndrome coronavirus 2
ATKAYNVTQAF

SEQ ID NO: 27170 - protein, 11 aa, Severe acute respiratory syndrome-related coronavirus
  REGION 1..11: note = Table C
  source 1..11: note = Severe acute respiratory syndrome coronavirus 2
KAYNVTQAFGR

SEQ ID NO: 27171 - protein, 11 aa, Severe acute respiratory syndrome-related coronavirus
  REGION 1..11: note = Table C
  source 1..11: note = Severe acute respiratory syndrome coronavirus 2
WPQIAQFAPSA

SEQ ID NO: 27172 - protein, 11 aa, Severe acute respiratory syndrome-related coronavirus
  REGION 1..11: note = Table C
  source 1..11: note = Severe acute respiratory syndrome coronavirus 2
AQFAPSASAFF

SEQ ID NO: 27173 - protein, 11 aa, Severe acute respiratory syndrome-related coronavirus
  REGION 1..11: note = Table C
  source 1..11: note = Severe acute respiratory syndrome coronavirus 2
GMSRIGMEVTP

SEQ ID NO: 27174 - protein, 11 aa, Severe acute respiratory syndrome-related coronavirus
  REGION 1..11: note = Table C
  source 1..11: note = Severe acute respiratory syndrome coronavirus 2
IGMEVTPSGTW

SEQ ID NO: 27175 - protein, 11 aa, Severe acute respiratory syndrome-related coronavirus
  REGION 1..11: note = Table C
  source 1..11: note = Severe acute respiratory syndrome coronavirus 2
EVTPSGTWLTY

SEQ ID NO: 27176 - protein, 11 aa, Severe acute respiratory syndrome-related coronavirus
  REGION 1..11: note = Table C
  source 1..11: note = Severe acute respiratory syndrome coronavirus 2
AYKTFPPTEPK

SEQ ID NO: 27177 - protein, 11 aa, Severe acute respiratory syndrome-related coronavirus
  REGION 1..11: note = Table C
  source 1..11: note = Severe acute respiratory syndrome coronavirus 2
KADETQALPQR

SEQ ID NO: 27178 - protein, 11 aa, Severe acute respiratory syndrome-related coronavirus
  REGION 1..11: note = Table C
  source 1..11: note = Severe acute respiratory syndrome coronavirus 2
ETQALPQRQKK

SEQ ID NO: 27179 - protein, 11 aa, Severe acute respiratory syndrome-related coronavirus
  REGION 1..11: note = Table C
  source 1..11: note = Severe acute respiratory syndrome coronavirus 2
LPQRQKKQQTV

SEQ ID NO: 27180 - protein, 15 aa, Severe acute respiratory syndrome-related coronavirus
  REGION 1..15: note = Spike Wuhan D614G; S_Wu_1_2; Table D
  source 1..15: note = Severe acute respiratory syndrome coronavirus 2
MFVFLVLLPLVSSQC

SEQ ID NO: 27181 - protein, 15 aa, Severe acute respiratory syndrome-related coronavirus
  REGION 1..15: note = Spike Wuhan D614G; S_Wu_1_2; Table D
  source 1..15: note = Severe acute respiratory syndrome coronavirus 2
LVLLPLVSSQCVNLT

SEQ ID NO: 27182 - protein, 15 aa, Severe acute respiratory syndrome-related coronavirus
  REGION 1..15: note = Spike Wuhan D614G; S_Wu_1_2; Table D
  source 1..15: note = Severe acute respiratory syndrome coronavirus 2
PLVSSQCVNLTTRTQ

SEQ ID NO: 27183 - protein, 15 aa, Severe acute respiratory syndrome-related coronavirus
  REGION 1..15: note = Spike Wuhan D614G; S_Wu_1_2; Table D
  source 1..15: note = Severe acute respiratory syndrome coronavirus 2
SQCVNLTTRTQLPPA

SEQ ID NO: 27184 - protein, 15 aa, Severe acute respiratory syndrome-related coronavirus
  REGION 1..15: note = Spike Wuhan D614G; S_Wu_1_2; Table D
  source 1..15: note = Severe acute respiratory syndrome coronavirus 2
NLTTRTQLPPAYTNS

SEQ ID NO: 27185 - protein, 15 aa, Severe acute respiratory syndrome-related coronavirus
  REGION 1..15: note = Spike Wuhan D614G; S_Wu_1_2; Table D
  source 1..15: note = Severe acute respiratory syndrome coronavirus 2
RTQLPPAYTNSFTRG

SEQ ID NO: 27186 - protein, 15 aa, Severe acute respiratory syndrome-related coronavirus
  REGION 1..15: note = Spike Wuhan D614G; S_Wu_1_2; Table D
  source 1..15: note = Severe acute respiratory syndrome coronavirus 2
PPAYTNSFTRGVYYP

SEQ ID NO: 27187 - protein, 15 aa, Severe acute respiratory syndrome-related coronavirus
  REGION 1..15: note = Spike Wuhan D614G; S_Wu_1_2; Table D
  source 1..15: note = Severe acute respiratory syndrome coronavirus 2
TNSFTRGVYYPDKVF

SEQ ID NO: 27188 - protein, 15 aa, Severe acute respiratory syndrome-related coronavirus
  REGION 1..15: note = Spike Wuhan D614G; S_Wu_1_2; Table D
  source 1..15: note = Severe acute respiratory syndrome coronavirus 2
TRGVYYPDKVFRSSV

SEQ ID NO: 27189 - protein, 15 aa, Severe acute respiratory syndrome-related coronavirus
  REGION 1..15: note = Spike Wuhan D614G; S_Wu_1_2; Table D
  source 1..15: note = Severe acute respiratory syndrome coronavirus 2
YYPDKVFRSSVLHST

SEQ ID NO: 27190 - protein, 15 aa, Severe acute respiratory syndrome-related coronavirus
  REGION 1..15: note = Spike Wuhan D614G; S_Wu_1_2; Table D
  source 1..15: note = Severe acute respiratory syndrome coronavirus 2
KVFRSSVLHSTQDLF

SEQ ID NO: 27191 - protein, 15 aa, Severe acute respiratory syndrome-related coronavirus
  REGION 1..15: note = Spike Wuhan D614G; S_Wu_1_2; Table D
  source 1..15: note = Severe acute respiratory syndrome coronavirus 2
SSVLHSTQDLFLPFF

SEQ ID NO: 27192 - protein, 15 aa, Severe acute respiratory syndrome-related coronavirus
  REGION 1..15: note = Spike Wuhan D614G; S_Wu_1_2; Table D
  source 1..15: note = Severe acute respiratory syndrome coronavirus 2
HSTQDLFLPFFSNVT

SEQ ID NO: 27193 - protein, 15 aa, Severe acute respiratory syndrome-related coronavirus
  REGION 1..15: note = Spike Wuhan D614G; S_Wu_1_2; Table D
  source 1..15: note = Severe acute respiratory syndrome coronavirus 2
DLFLPFFSNVTWFHA

SEQ ID NO: 27194 - protein, 15 aa, Severe acute respiratory syndrome-related coronavirus
  REGION 1..15: note = Spike Wuhan D614G; S_Wu_1_2; Table D
  source 1..15: note = Severe acute respiratory syndrome coronavirus 2
PFFSNVTWFHAIHVS

SEQ ID NO: 27195 - protein, 15 aa, Severe acute respiratory syndrome-related coronavirus
  REGION 1..15: note = Spike Wuhan D614G; S_Wu_1_2; Table D
  source 1..15: note = Severe acute respiratory syndrome coronavirus 2
NVTWFHAIHVSGTNG

SEQ ID NO: 27196 - protein, 15 aa, Severe acute respiratory syndrome-related coronavirus
  REGION 1..15: note = Spike Wuhan D614G; S_Wu_1_2; Table D
  source 1..15: note = Severe acute respiratory syndrome coronavirus 2
FHAIHVSGTNGTKRF

SEQ ID NO: 27197 - protein, 15 aa, Severe acute respiratory syndrome-related coronavirus
  REGION 1..15: note = Spike Wuhan D614G; S_Wu_1_2; Table D
  source 1..15: note = Severe acute respiratory syndrome coronavirus 2
HVSGTNGTKRFDNPV

SEQ ID NO: 27198 - protein, 15 aa, Severe acute respiratory syndrome-related coronavirus
  REGION 1..15: note = Spike Wuhan D614G; S_Wu_1_2; Table D
  source 1..15: note = Severe acute respiratory syndrome coronavirus 2
TNGTKRFDNPVLPFN

SEQ ID NO: 27199 - protein, 15 aa, Severe acute respiratory syndrome-related coronavirus
  REGION 1..15: note = Spike Wuhan D614G; S_Wu_1_2; Table D
  source 1..15: note = Severe acute respiratory syndrome coronavirus 2
KRFDNPVLPFNDGVY

SEQ ID NO: 27200 - protein, 15 aa, Severe acute respiratory syndrome-related coronavirus
  REGION 1..15: note = Spike Wuhan D614G; S_Wu_1_2; Table D
  source 1..15: note = Severe acute respiratory syndrome coronavirus 2
NPVLPFNDGVYFAST

SEQ ID NO: 27201 - protein, 15 aa, Severe acute respiratory syndrome-related coronavirus
  REGION 1..15: note = Spike Wuhan D614G; S_Wu_1_2; Table D
  source 1..15: note = Severe acute respiratory syndrome coronavirus 2
PFNDGVYFASTEKSN

SEQ ID NO: 27202 - protein, 15 aa, Severe acute respiratory syndrome-related coronavirus
  REGION 1..15: note = Spike Wuhan D614G; S_Wu_1_2; Table D
  source 1..15: note = Severe acute respiratory syndrome coronavirus 2
GVYFASTEKSNIIRG

SEQ ID NO: 27203 - protein, 15 aa, Severe acute respiratory syndrome-related coronavirus
  REGION 1..15: note = Spike Wuhan D614G; S_Wu_1_2; Table D
  source 1..15: note = Severe acute respiratory syndrome coronavirus 2
ASTEKSNIIRGWIFG

SEQ ID NO: 27204 - protein, 15 aa, Severe acute respiratory syndrome-related coronavirus
  REGION 1..15: note = Spike Wuhan D614G; S_Wu_1_2; Table D
  source 1..15: note = Severe acute respiratory syndrome coronavirus 2
KSNIIRGWIFGTTLD

SEQ ID NO: 27205 - protein, 15 aa, Severe acute respiratory syndrome-related coronavirus
  REGION 1..15: note = Spike Wuhan D614G; S_Wu_1_2; Table D
  source 1..15: note = Severe acute respiratory syndrome coronavirus 2
IRGWIFGTTLDSKTQ

SEQ ID NO: 27206 - protein, 15 aa, Severe acute respiratory syndrome-related coronavirus
  REGION 1..15: note = Spike Wuhan D614G; S_Wu_1_2; Table D
  source 1..15: note = Severe acute respiratory syndrome coronavirus 2
IFGTTLDSKTQSLLI

SEQ ID NO: 27207 - protein, 15 aa, Severe acute respiratory syndrome-related coronavirus
  REGION 1..15: note = Spike Wuhan D614G; S_Wu_1_2; Table D
  source 1..15: note = Severe acute respiratory syndrome coronavirus 2
TLDSKTQSLLIVNNA

SEQ ID NO: 27208 - protein, 15 aa, Severe acute respiratory syndrome-related coronavirus
  REGION 1..15: note = Spike Wuhan D614G; S_Wu_1_2; Table D
  source 1..15: note = Severe acute respiratory syndrome coronavirus 2
KTQSLLIVNNATNVV

SEQ ID NO: 27209 - protein, 15 aa, Severe acute respiratory syndrome-related coronavirus
  REGION 1..15: note = Spike Wuhan D614G; S_Wu_1_2; Table D
  source 1..15: note = Severe acute respiratory syndrome coronavirus 2
LLIVNNATNVVIKVC

SEQ ID NO: 27210 - protein, 15 aa, Severe acute respiratory syndrome-related coronavirus
  REGION 1..15: note = Spike Wuhan D614G; S_Wu_1_2; Table D
  source 1..15: note = Severe acute respiratory syndrome coronavirus 2
NNATNVVIKVCEFQF

SEQ ID NO: 27211 - protein, 15 aa, Severe acute respiratory syndrome-related coronavirus
  REGION 1..15: note = Spike Wuhan D614G; S_Wu_1_2; Table D
  source 1..15: note = Severe acute respiratory syndrome coronavirus 2
NVVIKVCEFQFCNDP

SEQ ID NO: 27212 - protein, 15 aa, Severe acute respiratory syndrome-related coronavirus
  REGION 1..15: note = Spike Wuhan D614G; S_Wu_1_2; Table D
  source 1..15: note = Severe acute respiratory syndrome coronavirus 2
KVCEFQFCNDPFLGV

SEQ ID NO: 27213 - protein, 15 aa, Severe acute respiratory syndrome-related coronavirus
  REGION 1..15: note = Spike Wuhan D614G; S_Wu_1_2; Table D
  source 1..15: note = Severe acute respiratory syndrome coronavirus 2
FQFCNDPFLGVYYHK

SEQ ID NO: 27214 - protein, 15 aa, Severe acute respiratory syndrome-related coronavirus
  REGION 1..15: note = Spike Wuhan D614G; S_Wu_1_2; Table D
  source 1..15: note = Severe acute respiratory syndrome coronavirus 2
NDPFLGVYYHKNNKS

SEQ ID NO: 27215 - protein, 15 aa, Severe acute respiratory syndrome-related coronavirus
  REGION 1..15: note = Spike Wuhan D614G; S_Wu_1_2; Table D
  source 1..15: note = Severe acute respiratory syndrome coronavirus 2
LGVYYHKNNKSWMES

SEQ ID NO: 27216 - protein, 15 aa, Severe acute respiratory syndrome-related coronavirus
  REGION 1..15: note = Spike Wuhan D614G; S_Wu_1_2; Table D
  source 1..15: note = Severe acute respiratory syndrome coronavirus 2
YHKNNKSWMESEFRV

SEQ ID NO: 27217 - protein, 15 aa, Severe acute respiratory syndrome-related coronavirus
  REGION 1..15: note = Spike Wuhan D614G; S_Wu_1_2; Table D
  source 1..15: note = Severe acute respiratory syndrome coronavirus 2
NKSWMESEFRVYSSA

SEQ ID NO: 27218 - protein, 15 aa, Severe acute respiratory syndrome-related coronavirus
  REGION 1..15: note = Spike Wuhan D614G; S_Wu_1_2; Table D
  source 1..15: note = Severe acute respiratory syndrome coronavirus 2
MESEFRVYSSANNCT

SEQ ID NO: 27219 - protein, 15 aa, Severe acute respiratory syndrome-related coronavirus
  REGION 1..15: note = Spike Wuhan D614G; S_Wu_1_2; Table D
  source 1..15: note = Severe acute respiratory syndrome coronavirus 2
FRVYSSANNCTFEYV

SEQ ID NO: 27220 - protein, 15 aa, Severe acute respiratory syndrome-related coronavirus
  REGION 1..15: note = Spike Wuhan D614G; S_Wu_1_2; Table D
  source 1..15: note = Severe acute respiratory syndrome coronavirus 2
SSANNCTFEYVSQPF

SEQ ID NO: 27221 - protein, 15 aa, Severe acute respiratory syndrome-related coronavirus
  REGION 1..15: note = Spike Wuhan D614G; S_Wu_1_2; Table D
  source 1..15: note = Severe acute respiratory syndrome coronavirus 2
NCTFEYVSQPFLMDL

SEQ ID NO: 27222 - protein, 15 aa, Severe acute respiratory syndrome-related coronavirus
  REGION 1..15: note = Spike Wuhan D614G; S_Wu_1_2; Table D
  source 1..15: note = Severe acute respiratory syndrome coronavirus 2
EYVSQPFLMDLEGKQ

SEQ ID NO: 27223 - protein, 15 aa, Severe acute respiratory syndrome-related coronavirus
  REGION 1..15: note = Spike Wuhan D614G; S_Wu_1_2; Table D
  source 1..15: note = Severe acute respiratory syndrome coronavirus 2
QPFLMDLEGKQGNFK

SEQ ID NO: 27224 - protein, 15 aa, Severe acute respiratory syndrome-related coronavirus
  REGION 1..15: note = Spike Wuhan D614G; S_Wu_1_2; Table D
  source 1..15: note = Severe acute respiratory syndrome coronavirus 2
MDLEGKQGNFKNLRE

SEQ ID NO: 27225 - protein, 15 aa, Severe acute respiratory syndrome-related coronavirus
  REGION 1..15: note = Spike Wuhan D614G; S_Wu_1_2; Table D
  source 1..15: note = Severe acute respiratory syndrome coronavirus 2
GKQGNFKNLREFVFK

SEQ ID NO: 27226 - protein, 15 aa, Severe acute respiratory syndrome-related coronavirus
  REGION 1..15: note = Spike Wuhan D614G; S_Wu_1_2; Table D
  source 1..15: note = Severe acute respiratory syndrome coronavirus 2
NFKNLREFVFKNIDG

SEQ ID NO: 27227 - protein, 15 aa, Severe acute respiratory syndrome-related coronavirus
  REGION 1..15: note = Spike Wuhan D614G; S_Wu_1_2; Table D
  source 1..15: note = Severe acute respiratory syndrome coronavirus 2
LREFVFKNIDGYFKI

SEQ ID NO: 27228 - protein, 15 aa, Severe acute respiratory syndrome-related coronavirus
  REGION 1..15: note = Spike Wuhan D614G; S_Wu_1_2; Table D
  source 1..15: note = Severe acute respiratory syndrome coronavirus 2
VFKNIDGYFKIYSKH

SEQ ID NO: 27229 - protein, 15 aa, Severe acute respiratory syndrome-related coronavirus
  REGION 1..15: note = Spike Wuhan D614G; S_Wu_1_2; Table D
  source 1..15: note = Severe acute respiratory syndrome coronavirus 2
IDGYFKIYSKHTPIN

SEQ ID NO: 27230 - protein, 15 aa, Severe acute respiratory syndrome-related coronavirus
  REGION 1..15: note = Spike Wuhan D614G; S_Wu_1_2; Table D
  source 1..15: note = Severe acute respiratory syndrome coronavirus 2
FKIYSKHTPINLVRD

SEQ ID NO: 27231 - protein, 15 aa, Severe acute respiratory syndrome-related coronavirus
  REGION 1..15: note = Spike Wuhan D614G; S_Wu_1_2; Table D
  source 1..15: note = Severe acute respiratory syndrome coronavirus 2
SKHTPINLVRDLPQG

SEQ ID NO: 27232 - protein, 15 aa, Severe acute respiratory syndrome-related coronavirus
  REGION 1..15: note = Spike Wuhan D614G; S_Wu_1_2; Table D
  source 1..15: note = Severe acute respiratory syndrome coronavirus 2
PINLVRDLPQGFSAL

SEQ ID NO: 27233 - protein, 15 aa, Severe acute respiratory syndrome-related coronavirus
  REGION 1..15: note = Spike Wuhan D614G; S_Wu_1_2; Table D
  source 1..15: note = Severe acute respiratory syndrome coronavirus 2
VRDLPQGFSALEPLV

SEQ ID NO: 27234 - protein, 15 aa, Severe acute respiratory syndrome-related coronavirus
  REGION 1..15: note = Spike Wuhan D614G; S_Wu_1_2; Table D
  source 1..15: note = Severe acute respiratory syndrome coronavirus 2
PQGFSALEPLVDLPI

SEQ ID NO: 27235 - protein, 15 aa, Severe acute respiratory syndrome-related coronavirus
  REGION 1..15: note = Spike Wuhan D614G; S_Wu_1_2; Table D
  source 1..15: note = Severe acute respiratory syndrome coronavirus 2
SALEPLVDLPIGINI

SEQ ID NO: 27236 - protein, 15 aa, Severe acute respiratory syndrome-related coronavirus
  REGION 1..15: note = Spike Wuhan D614G; S_Wu_1_2; Table D
  source 1..15: note = Severe acute respiratory syndrome coronavirus 2
PLVDLPIGINITRFQ

SEQ ID NO: 27237 - protein, 15 aa, Severe acute respiratory syndrome-related coronavirus
  REGION 1..15: note = Spike Wuhan D614G; S_Wu_1_2; Table D
  source 1..15: note = Severe acute respiratory syndrome coronavirus 2
LPIGINITRFQTLLA

SEQ ID NO: 27238 - protein, 15 aa, Severe acute respiratory syndrome-related coronavirus
  REGION 1..15: note = Spike Wuhan D614G; S_Wu_1_2; Table D
  source 1..15: note = Severe acute respiratory syndrome coronavirus 2
INITRFQTLLALHRS

SEQ ID NO: 27239 - protein, 15 aa, Severe acute respiratory syndrome-related coronavirus
  REGION 1..15: note = Spike Wuhan D614G; S_Wu_1_2; Table D
  source 1..15: note = Severe acute respiratory syndrome coronavirus 2
RFQTLLALHRSYLTP

SEQ ID NO: 27240 - protein, 15 aa, Severe acute respiratory syndrome-related coronavirus
  REGION 1..15: note = Spike Wuhan D614G; S_Wu_1_2; Table D
  source 1..15: note = Severe acute respiratory syndrome coronavirus 2
LLALHRSYLTPGDSS

SEQ ID NO: 27241 - protein, 15 aa, Severe acute respiratory syndrome-related coronavirus
  REGION 1..15: note = Spike Wuhan D614G; S_Wu_1_2; Table D
  source 1..15: note = Severe acute respiratory syndrome coronavirus 2
HRSYLTPGDSSSGWT

SEQ ID NO: 27242 - protein, 15 aa, Severe acute respiratory syndrome-related coronavirus
  REGION 1..15: note = Spike Wuhan D614G; S_Wu_1_2; Table D
  source 1..15: note = Severe acute respiratory syndrome coronavirus 2
LTPGDSSSGWTAGAA

SEQ ID NO: 27243 - protein, 15 aa, Severe acute respiratory syndrome-related coronavirus
  REGION 1..15: note = Spike Wuhan D614G; S_Wu_1_2; Table D
  source 1..15: note = Severe acute respiratory syndrome coronavirus 2
DSSSGWTAGAAAYYV

SEQ ID NO: 27244 - protein, 15 aa, Severe acute respiratory syndrome-related coronavirus
  REGION 1..15: note = Spike Wuhan D614G; S_Wu_1_2; Table D
  source 1..15: note = Severe acute respiratory syndrome coronavirus 2
GWTAGAAAYYVGYLQ

SEQ ID NO: 27245 - protein, 15 aa, Severe acute respiratory syndrome-related coronavirus
  REGION 1..15: note = Spike Wuhan D614G; S_Wu_1_2; Table D
  source 1..15: note = Severe acute respiratory syndrome coronavirus 2
GAAAYYVGYLQPRTF

SEQ ID NO: 27246 - protein, 15 aa, Severe acute respiratory syndrome-related coronavirus
  REGION 1..15: note = Spike Wuhan D614G; S_Wu_1_2; Table D
  source 1..15: note = Severe acute respiratory syndrome coronavirus 2
YYVGYLQPRTFLLKY

SEQ ID NO: 27247 - protein, 15 aa, Severe acute respiratory syndrome-related coronavirus
  REGION 1..15: note = Spike Wuhan D614G; S_Wu_1_2; Table D
  source 1..15: note = Severe acute respiratory syndrome coronavirus 2
YLQPRTFLLKYNENG

SEQ ID NO: 27248 - protein, 15 aa, Severe acute respiratory syndrome-related coronavirus
  REGION 1..15: note = Spike Wuhan D614G; S_Wu_1_2; Table D
  source 1..15: note = Severe acute respiratory syndrome coronavirus 2
RTFLLKYNENGTITD

SEQ ID NO: 27249 - protein, 15 aa, Severe acute respiratory syndrome-related coronavirus
  REGION 1..15: note = Spike Wuhan D614G; S_Wu_1_2; Table D
  source 1..15: note = Severe acute respiratory syndrome coronavirus 2
LKYNENGTITDAVDC

SEQ ID NO: 27250 - protein, 15 aa, Severe acute respiratory syndrome-related coronavirus
  REGION 1..15: note = Spike Wuhan D614G; S_Wu_1_2; Table D
  source 1..15: note = Severe acute respiratory syndrome coronavirus 2
ENGTITDAVDCALDP

SEQ ID NO: 27251 - protein, 15 aa, Severe acute respiratory syndrome-related coronavirus
  REGION 1..15: note = Spike Wuhan D614G; S_Wu_1_2; Table D
  source 1..15: note = Severe acute respiratory syndrome coronavirus 2
ITDAVDCALDPLSET

SEQ ID NO: 27252 - protein, 15 aa, Severe acute respiratory syndrome-related coronavirus
  REGION 1..15: note = Spike Wuhan D614G; S_Wu_1_2; Table D
  source 1..15: note = Severe acute respiratory syndrome coronavirus 2
VDCALDPLSETKCTL

SEQ ID NO: 27253 - protein, 15 aa, Severe acute respiratory syndrome-related coronavirus
  REGION 1..15: note = Spike Wuhan D614G; S_Wu_1_2; Table D
  source 1..15: note = Severe acute respiratory syndrome coronavirus 2
LDPLSETKCTLKSFT

SEQ ID NO: 27254 - protein, 15 aa, Severe acute respiratory syndrome-related coronavirus
  REGION 1..15: note = Spike Wuhan D614G; S_Wu_1_2; Table D
  source 1..15: note = Severe acute respiratory syndrome coronavirus 2
SETKCTLKSFTVEKG

SEQ ID NO: 27255 - protein, 15 aa, Severe acute respiratory syndrome-related coronavirus
  REGION 1..15: note = Spike Wuhan D614G; S_Wu_1_2; Table D
  source 1..15: note = Severe acute respiratory syndrome coronavirus 2
CTLKSFTVEKGIYQT

SEQ ID NO: 27256 - protein, 15 aa, Severe acute respiratory syndrome-related coronavirus
  REGION 1..15: note = Spike Wuhan D614G; S_Wu_1_2; Table D
  source 1..15: note = Severe acute respiratory syndrome coronavirus 2
SFTVEKGIYQTSNFR

SEQ ID NO: 27257 - protein, 15 aa, Severe acute respiratory syndrome-related coronavirus
  REGION 1..15: note = Spike Wuhan D614G; S_Wu_1_2; Table D
  source 1..15: note = Severe acute respiratory syndrome coronavirus 2
EKGIYQTSNFRVQPT

SEQ ID NO: 27258 - protein, 15 aa, Severe acute respiratory syndrome-related coronavirus
  REGION 1..15: note = Spike Wuhan D614G; S_Wu_1_2; Table D
  source 1..15: note = Severe acute respiratory syndrome coronavirus 2
YQTSNFRVQPTESIV

SEQ ID NO: 27259 - protein, 15 aa, Severe acute respiratory syndrome-related coronavirus
  REGION 1..15: note = Spike Wuhan D614G; S_Wu_1_2; Table D
  source 1..15: note = Severe acute respiratory syndrome coronavirus 2
NFRVQPTESIVRFPN

SEQ ID NO: 27260 - protein, 15 aa, Severe acute respiratory syndrome-related coronavirus
  REGION 1..15: note = Spike Wuhan D614G; S_Wu_3_4; Table D
  source 1..15: note = Severe acute respiratory syndrome coronavirus 2
QPTESIVRFPNITNL

SEQ ID NO: 27261 - protein, 15 aa, Severe acute respiratory syndrome-related coronavirus
  REGION 1..15: note = Spike Wuhan D614G; S_Wu_3_4; Table D
  source 1..15: note = Severe acute respiratory syndrome coronavirus 2
SIVRFPNITNLCPFG

SEQ ID NO: 27262 - protein, 15 aa, Severe acute respiratory syndrome-related coronavirus
  REGION 1..15: note = Spike Wuhan D614G; S_Wu_3_4; Table D
  source 1..15: note = Severe acute respiratory syndrome coronavirus 2
FPNITNLCPFGEVFN

SEQ ID NO: 27263 - protein, 15 aa, Severe acute respiratory syndrome-related coronavirus
  REGION 1..15: note = Spike Wuhan D614G; S_Wu_3_4; Table D
  source 1..15: note = Severe acute respiratory syndrome coronavirus 2
TNLCPFGEVFNATRF

SEQ ID NO: 27264 - protein, 15 aa, Severe acute respiratory syndrome-related coronavirus
  REGION 1..15: note = Spike Wuhan D614G; S_Wu_3_4; Table D
  source 1..15: note = Severe acute respiratory syndrome coronavirus 2
PFGEVFNATRFASVY

SEQ ID NO: 27265 - protein, 15 aa, Severe acute respiratory syndrome-related coronavirus
  REGION 1..15: note = Spike Wuhan D614G; S_Wu_3_4; Table D
  source 1..15: note = Severe acute respiratory syndrome coronavirus 2
VFNATRFASVYAWNR

SEQ ID NO: 27266 - protein, 15 aa, Severe acute respiratory syndrome-related coronavirus
  REGION 1..15: note = Spike Wuhan D614G; S_Wu_3_4; Table D
  source 1..15: note = Severe acute respiratory syndrome coronavirus 2
TRFASVYAWNRKRIS

SEQ ID NO: 27267 - protein, 15 aa, Severe acute respiratory syndrome-related coronavirus
  REGION 1..15: note = Spike Wuhan D614G; S_Wu_3_4; Table D
  source 1..15: note = Severe acute respiratory syndrome coronavirus 2
SVYAWNRKRISNCVA

SEQ ID NO: 27268 - protein, 15 aa, Severe acute respiratory syndrome-related coronavirus
  REGION 1..15: note = Spike Wuhan D614G; S_Wu_3_4; Table D
  source 1..15: note = Severe acute respiratory syndrome coronavirus 2
WNRKRISNCVADYSV

SEQ ID NO: 27269 - protein, 15 aa, Severe acute respiratory syndrome-related coronavirus
  REGION 1..15: note = Spike Wuhan D614G; S_Wu_3_4; Table D
  source 1..15: note = Severe acute respiratory syndrome coronavirus 2
RISNCVADYSVLYNS

SEQ ID NO: 27270 - protein, 15 aa, Severe acute respiratory syndrome-related coronavirus
  REGION 1..15: note = Spike Wuhan D614G; S_Wu_3_4; Table D
  source 1..15: note = Severe acute respiratory syndrome coronavirus 2
CVADYSVLYNSASFS

SEQ ID NO: 27271 - protein, 15 aa, Severe acute respiratory syndrome-related coronavirus
  REGION 1..15: note = Spike Wuhan D614G; S_Wu_3_4; Table D
  source 1..15: note = Severe acute respiratory syndrome coronavirus 2
YSVLYNSASFSTFKC

SEQ ID NO: 27272 - protein, 15 aa, Severe acute respiratory syndrome-related coronavirus
  REGION 1..15: note = Spike Wuhan D614G; S_Wu_3_4; Table D
  source 1..15: note = Severe acute respiratory syndrome coronavirus 2
YNSASFSTFKCYGVS

SEQ ID NO: 27273 - protein, 15 aa, Severe acute respiratory syndrome-related coronavirus
  REGION 1..15: note = Spike Wuhan D614G; S_Wu_3_4; Table D
  source 1..15: note = Severe acute respiratory syndrome coronavirus 2
SFSTFKCYGVSPTKL

SEQ ID NO: 27274 - protein, 15 aa, Severe acute respiratory syndrome-related coronavirus
  REGION 1..15: note = Spike Wuhan D614G; S_Wu_3_4; Table D
  source 1..15: note = Severe acute respiratory syndrome coronavirus 2
FKCYGVSPTKLNDLC

SEQ ID NO: 27275 - protein, 15 aa, Severe acute respiratory syndrome-related coronavirus
  REGION 1..15: note = Spike Wuhan D614G; S_Wu_3_4; Table D
  source 1..15: note = Severe acute respiratory syndrome coronavirus 2
GVSPTKLNDLCFTNV

SEQ ID NO: 27276 - protein, 15 aa, Severe acute respiratory syndrome-related coronavirus
  REGION 1..15: note = Spike Wuhan D614G; S_Wu_3_4; Table D
  source 1..15: note = Severe acute respiratory syndrome coronavirus 2
TKLNDLCFTNVYADS

SEQ ID NO: 27277 - protein, 15 aa, Severe acute respiratory syndrome-related coronavirus
  REGION 1..15: note = Spike Wuhan D614G; S_Wu_3_4; Table D
  source 1..15: note = Severe acute respiratory syndrome coronavirus 2
DLCFTNVYADSFVIR

SEQ ID NO: 27278 - protein, 15 aa, Severe acute respiratory syndrome-related coronavirus
  REGION 1..15: note = Spike Wuhan D614G; S_Wu_3_4; Table D
  source 1..15: note = Severe acute respiratory syndrome coronavirus 2
TNVYADSFVIRGDEV

SEQ ID NO: 27279 - protein, 15 aa, Severe acute respiratory syndrome-related coronavirus
  REGION 1..15: note = Spike Wuhan D614G; S_Wu_3_4; Table D
  source 1..15: note = Severe acute respiratory syndrome coronavirus 2
ADSFVIRGDEVRQIA

SEQ ID NO: 27280 - protein, 15 aa, Severe acute respiratory syndrome-related coronavirus
  REGION 1..15: note = Spike Wuhan D614G; S_Wu_3_4; Table D
  source 1..15: note = Severe acute respiratory syndrome coronavirus 2
VIRGDEVRQIAPGQT

SEQ ID NO: 27281 - protein, 15 aa, Severe acute respiratory syndrome-related coronavirus
  REGION 1..15: note = Spike Wuhan D614G; S_Wu_3_4; Table D
  source 1..15: note = Severe acute respiratory syndrome coronavirus 2
DEVRQIAPGQTGKIA

SEQ ID NO: 27282 - protein, 15 aa, Severe acute respiratory syndrome-related coronavirus
  REGION 1..15: note = Spike Wuhan D614G; S_Wu_3_4; Table D
  source 1..15: note = Severe acute respiratory syndrome coronavirus 2
QIAPGQTGKIADYNY

SEQ ID NO: 27283 - protein, 15 aa, Severe acute respiratory syndrome-related coronavirus
  REGION 1..15: note = Spike Wuhan D614G; S_Wu_3_4; Table D
  source 1..15: note = Severe acute respiratory syndrome coronavirus 2
GQTGKIADYNYKLPD

SEQ ID NO: 27284 - protein, 15 aa, Severe acute respiratory syndrome-related coronavirus
  REGION 1..15: note = Spike Wuhan D614G; S_Wu_3_4; Table D
  source 1..15: note = Severe acute respiratory syndrome coronavirus 2
KIADYNYKLPDDFTG

SEQ ID NO: 27285 - protein, 15 aa, Severe acute respiratory syndrome-related coronavirus
  REGION 1..15: note = Spike Wuhan D614G; S_Wu_3_4; Table D
  source 1..15: note = Severe acute respiratory syndrome coronavirus 2
YNYKLPDDFTGCVIA

SEQ ID NO: 27286 - protein, 15 aa, Severe acute respiratory syndrome-related coronavirus
  REGION 1..15: note = Spike Wuhan D614G; S_Wu_3_4; Table D
  source 1..15: note = Severe acute respiratory syndrome coronavirus 2
LPDDFTGCVIAWNSN

SEQ ID NO: 27287 - protein, 15 aa, Severe acute respiratory syndrome-related coronavirus
  REGION 1..15: note = Spike Wuhan D614G; S_Wu_3_4; Table D
  source 1..15: note = Severe acute respiratory syndrome coronavirus 2
FTGCVIAWNSNNLDS

SEQ ID NO: 27288 - protein, 15 aa, Severe acute respiratory syndrome-related coronavirus
  REGION 1..15: note = Spike Wuhan D614G; S_Wu_3_4; Table D
  source 1..15: note = Severe acute respiratory syndrome coronavirus 2
VIAWNSNNLDSKVGG

SEQ ID NO: 27289 - protein, 15 aa, Severe acute respiratory syndrome-related coronavirus
  REGION 1..15: note = Spike Wuhan D614G; S_Wu_3_4; Table D
  source 1..15: note = Severe acute respiratory syndrome coronavirus 2
NSNNLDSKVGGNYNY

SEQ ID NO: 27290 - protein, 15 aa, Severe acute respiratory syndrome-related coronavirus
  REGION 1..15: note = Spike Wuhan D614G; S_Wu_3_4; Table D
  source 1..15: note = Severe acute respiratory syndrome coronavirus 2
LDSKVGGNYNYLYRL

SEQ ID NO: 27291 - protein, 15 aa, Severe acute respiratory syndrome-related coronavirus
  REGION 1..15: note = Spike Wuhan D614G; S_Wu_3_4; Table D
  source 1..15: note = Severe acute respiratory syndrome coronavirus 2
VGGNYNYLYRLFRKS

SEQ ID NO: 27292 - protein, 15 aa, Severe acute respiratory syndrome-related coronavirus
  REGION 1..15: note = Spike Wuhan D614G; S_Wu_3_4; Table D
  source 1..15: note = Severe acute respiratory syndrome coronavirus 2
YNYLYRLFRKSNLKP

SEQ ID NO: 27293 - protein, 15 aa, Severe acute respiratory syndrome-related coronavirus
  REGION 1..15: note = Spike Wuhan D614G; S_Wu_3_4; Table D
  source 1..15: note = Severe acute respiratory syndrome coronavirus 2
YRLFRKSNLKPFERD

SEQ ID NO: 27294 - protein, 15 aa, Severe acute respiratory syndrome-related coronavirus
  REGION 1..15: note = Spike Wuhan D614G; S_Wu_3_4; Table D
  source 1..15: note = Severe acute respiratory syndrome coronavirus 2
RKSNLKPFERDISTE

SEQ ID NO: 27295 - protein, 15 aa, Severe acute respiratory syndrome-related coronavirus
  REGION 1..15: note = Spike Wuhan D614G; S_Wu_3_4; Table D
  source 1..15: note = Severe acute respiratory syndrome coronavirus 2
LKPFERDISTEIYQA

SEQ ID NO: 27296 - protein, 15 aa, Severe acute respiratory syndrome-related coronavirus
  REGION 1..15: note = Spike Wuhan D614G; S_Wu_3_4; Table D
  source 1..15: note = Severe acute respiratory syndrome coronavirus 2
ERDISTEIYQAGSTP

SEQ ID NO: 27297 - protein, 15 aa, Severe acute respiratory syndrome-related coronavirus
  REGION 1..15: note = Spike Wuhan D614G; S_Wu_3_4; Table D
  source 1..15: note = Severe acute respiratory syndrome coronavirus 2
STEIYQAGSTPCNGV

SEQ ID NO: 27298 - protein, 15 aa, Severe acute respiratory syndrome-related coronavirus
  REGION 1..15: note = Spike Wuhan D614G; S_Wu_3_4; Table D
  source 1..15: note = Severe acute respiratory syndrome coronavirus 2
YQAGSTPCNGVEGFN

SEQ ID NO: 27299 - protein, 15 aa, Severe acute respiratory syndrome-related coronavirus
  REGION 1..15: note = Spike Wuhan D614G; S_Wu_3_4; Table D
  source 1..15: note = Severe acute respiratory syndrome coronavirus 2
STPCNGVEGFNCYFP

SEQ ID NO: 27300 - protein, 15 aa, Severe acute respiratory syndrome-related coronavirus
  REGION 1..15: note = Spike Wuhan D614G; S_Wu_3_4; Table D
  source 1..15: note = Severe acute respiratory syndrome coronavirus 2
NGVEGFNCYFPLQSY

SEQ ID NO: 27301 - protein, 15 aa, Severe acute respiratory syndrome-related coronavirus
  REGION 1..15: note = Spike Wuhan D614G; S_Wu_3_4; Table D
  source 1..15: note = Severe acute respiratory syndrome coronavirus 2
GFNCYFPLQSYGFQP

SEQ ID NO: 27302 - protein, 15 aa, Severe acute respiratory syndrome-related coronavirus
  REGION 1..15: note = Spike Wuhan D614G; S_Wu_3_4; Table D
  source 1..15: note = Severe acute respiratory syndrome coronavirus 2
YFPLQSYGFQPTNGV

SEQ ID NO: 27303 - protein, 15 aa, Severe acute respiratory syndrome-related coronavirus
  REGION 1..15: note = Spike Wuhan D614G; S_Wu_3_4; Table D
  source 1..15: note = Severe acute respiratory syndrome coronavirus 2
QSYGFQPTNGVGYQP

SEQ ID NO: 27304 - protein, 15 aa, Severe acute respiratory syndrome-related coronavirus
  REGION 1..15: note = Spike Wuhan D614G; S_Wu_3_4; Table D
  source 1..15: note = Severe acute respiratory syndrome coronavirus 2
FQPTNGVGYQPYRVV

SEQ ID NO: 27305 - protein, 15 aa, Severe acute respiratory syndrome-related coronavirus
  REGION 1..15: note = Spike Wuhan D614G; S_Wu_3_4; Table D
  source 1..15: note = Severe acute respiratory syndrome coronavirus 2
NGVGYQPYRVVVLSF

SEQ ID NO: 27306 - protein, 15 aa, Severe acute respiratory syndrome-related coronavirus
  REGION 1..15: note = Spike Wuhan D614G; S_Wu_3_4; Table D
  source 1..15: note = Severe acute respiratory syndrome coronavirus 2
YQPYRVVVLSFELLH

SEQ ID NO: 27307 - protein, 15 aa, Severe acute respiratory syndrome-related coronavirus
  REGION 1..15: note = Spike Wuhan D614G; S_Wu_3_4; Table D
  source 1..15: note = Severe acute respiratory syndrome coronavirus 2
RVVVLSFELLHAPAT

SEQ ID NO: 27308 - protein, 15 aa, Severe acute respiratory syndrome-related coronavirus
  REGION 1..15: note = Spike Wuhan D614G; S_Wu_3_4; Table D
  source 1..15: note = Severe acute respiratory syndrome coronavirus 2
LSFELLHAPATVCGP

SEQ ID NO: 27309 - protein, 15 aa, Severe acute respiratory syndrome-related coronavirus
  REGION 1..15: note = Spike Wuhan D614G; S_Wu_3_4; Table D
  source 1..15: note = Severe acute respiratory syndrome coronavirus 2
LLHAPATVCGPKKST

SEQ ID NO: 27310 - protein, 15 aa, Severe acute respiratory syndrome-related coronavirus
  REGION 1..15: note = Spike Wuhan D614G; S_Wu_3_4; Table D
  source 1..15: note = Severe acute respiratory syndrome coronavirus 2
PATVCGPKKSTNLVK

SEQ ID NO: 27311 - protein, 15 aa, Severe acute respiratory syndrome-related coronavirus
  REGION 1..15: note = Spike Wuhan D614G; S_Wu_3_4; Table D
  source 1..15: note = Severe acute respiratory syndrome coronavirus 2
CGPKKSTNLVKNKCV

SEQ ID NO: 27312 - protein, 15 aa, Severe acute respiratory syndrome-related coronavirus
  REGION 1..15: note = Spike Wuhan D614G; S_Wu_3_4; Table D
  source 1..15: note = Severe acute respiratory syndrome coronavirus 2
KSTNLVKNKCVNFNF

SEQ ID NO: 27313 - protein, 15 aa, Severe acute respiratory syndrome-related coronavirus
  REGION 1..15: note = Spike Wuhan D614G; S_Wu_3_4; Table D
  source 1..15: note = Severe acute respiratory syndrome coronavirus 2
LVKNKCVNFNFNGLT

SEQ ID NO: 27314 - protein, 15 aa, Severe acute respiratory syndrome-related coronavirus
  REGION 1..15: note = Spike Wuhan D614G; S_Wu_3_4; Table D
  source 1..15: note = Severe acute respiratory syndrome coronavirus 2
KCVNFNFNGLTGTGV

SEQ ID NO: 27315 - protein, 15 aa, Severe acute respiratory syndrome-related coronavirus
  REGION 1..15: note = Spike Wuhan D614G; S_Wu_3_4; Table D
  source 1..15: note = Severe acute respiratory syndrome coronavirus 2
FNFNGLTGTGVLTES

SEQ ID NO: 27316 - protein, 15 aa, Severe acute respiratory syndrome-related coronavirus
  REGION 1..15: note = Spike Wuhan D614G; S_Wu_3_4; Table D
  source 1..15: note = Severe acute respiratory syndrome coronavirus 2
GLTGTGVLTESNKKF

SEQ ID NO: 27317 - protein, 15 aa, Severe acute respiratory syndrome-related coronavirus
  REGION 1..15: note = Spike Wuhan D614G; S_Wu_3_4; Table D
  source 1..15: note = Severe acute respiratory syndrome coronavirus 2
TGVLTESNKKFLPFQ

SEQ ID NO: 27318 - protein, 15 aa, Severe acute respiratory syndrome-related coronavirus
  REGION 1..15: note = Spike Wuhan D614G; S_Wu_3_4; Table D
  source 1..15: note = Severe acute respiratory syndrome coronavirus 2
TESNKKFLPFQQFGR

SEQ ID NO: 27319 - protein, 15 aa, Severe acute respiratory syndrome-related coronavirus
  REGION 1..15: note = Spike Wuhan D614G; S_Wu_3_4; Table D
  source 1..15: note = Severe acute respiratory syndrome coronavirus 2
KKFLPFQQFGRDIAD

SEQ ID NO: 27320 - protein, 15 aa, Severe acute respiratory syndrome-related coronavirus
  REGION 1..15: note = Spike Wuhan D614G; S_Wu_3_4; Table D
  source 1..15: note = Severe acute respiratory syndrome coronavirus 2
PFQQFGRDIADTTDA

SEQ ID NO: 27321 - protein, 15 aa, Severe acute respiratory syndrome-related coronavirus
  REGION 1..15: note = Spike Wuhan D614G; S_Wu_3_4; Table D
  source 1..15: note = Severe acute respiratory syndrome coronavirus 2
FGRDIADTTDAVRDP

SEQ ID NO: 27322 - protein, 15 aa, Severe acute respiratory syndrome-related coronavirus
  REGION 1..15: note = Spike Wuhan D614G; S_Wu_3_4; Table D
  source 1..15: note = Severe acute respiratory syndrome coronavirus 2
IADTTDAVRDPQTLE

SEQ ID NO: 27323 - protein, 15 aa, Severe acute respiratory syndrome-related coronavirus
  REGION 1..15: note = Spike Wuhan D614G; S_Wu_3_4; Table D
  source 1..15: note = Severe acute respiratory syndrome coronavirus 2
TDAVRDPQTLEILDI

SEQ ID NO: 27324 - protein, 15 aa, Severe acute respiratory syndrome-related coronavirus
  REGION 1..15: note = Spike Wuhan D614G; S_Wu_3_4; Table D
  source 1..15: note = Severe acute respiratory syndrome coronavirus 2
RDPQTLEILDITPCS

SEQ ID NO: 27325 - protein, 15 aa, Severe acute respiratory syndrome-related coronavirus
  REGION 1..15: note = Spike Wuhan D614G; S_Wu_3_4; Table D
  source 1..15: note = Severe acute respiratory syndrome coronavirus 2
TLEILDITPCSFGGV

SEQ ID NO: 27326 - protein, 15 aa, Severe acute respiratory syndrome-related coronavirus
  REGION 1..15: note = Spike Wuhan D614G; S_Wu_3_4; Table D
  source 1..15: note = Severe acute respiratory syndrome coronavirus 2
LDITPCSFGGVSVIT

SEQ ID NO: 27327 - protein, 15 aa, Severe acute respiratory syndrome-related coronavirus
  REGION 1..15: note = Spike Wuhan D614G; S_Wu_3_4; Table D
  source 1..15: note = Severe acute respiratory syndrome coronavirus 2
PCSFGGVSVITPGTN

SEQ ID NO: 27328 - protein, 15 aa, Severe acute respiratory syndrome-related coronavirus
  REGION 1..15: note = Spike Wuhan D614G; S_Wu_3_4; Table D
  source 1..15: note = Severe acute respiratory syndrome coronavirus 2
GGVSVITPGTNTSNQ

SEQ ID NO: 27329 - protein, 15 aa, Severe acute respiratory syndrome-related coronavirus
  REGION 1..15: note = Spike Wuhan D614G; S_Wu_3_4; Table D
  source 1..15: note = Severe acute respiratory syndrome coronavirus 2
VITPGTNTSNQVAVL

SEQ ID NO: 27330 - protein, 15 aa, Severe acute respiratory syndrome-related coronavirus
  REGION 1..15: note = Spike Wuhan D614G; S_Wu_3_4; Table D
  source 1..15: note = Severe acute respiratory syndrome coronavirus 2
GTNTSNQVAVLYQGV

SEQ ID NO: 27331 - protein, 15 aa, Severe acute respiratory syndrome-related coronavirus
  REGION 1..15: note = Spike Wuhan D614G; S_Wu_3_4; Table D
  source 1..15: note = Severe acute respiratory syndrome coronavirus 2
SNQVAVLYQGVNCTE

SEQ ID NO: 27332 - protein, 15 aa, Severe acute respiratory syndrome-related coronavirus
  REGION 1..15: note = Spike Wuhan D614G; S_Wu_3_4; Table D
  source 1..15: note = Severe acute respiratory syndrome coronavirus 2
AVLYQGVNCTEVPVA

SEQ ID NO: 27333 - protein, 15 aa, Severe acute respiratory syndrome-related coronavirus
  REGION 1..15: note = Spike Wuhan D614G; S_Wu_3_4; Table D
  source 1..15: note = Severe acute respiratory syndrome coronavirus 2
QGVNCTEVPVAIHAD

SEQ ID NO: 27334 - protein, 15 aa, Severe acute respiratory syndrome-related coronavirus
  REGION 1..15: note = Spike Wuhan D614G; S_Wu_3_4; Table D
  source 1..15: note = Severe acute respiratory syndrome coronavirus 2
CTEVPVAIHADQLTP

SEQ ID NO: 27335 - protein, 15 aa, Severe acute respiratory syndrome-related coronavirus
  REGION 1..15: note = Spike Wuhan D614G; S_Wu_3_4; Table D
  source 1..15: note = Severe acute respiratory syndrome coronavirus 2
PVAIHADQLTPTWRV

SEQ ID NO: 27336 - protein, 15 aa, Severe acute respiratory syndrome-related coronavirus
  REGION 1..15: note = Spike Wuhan D614G; S_Wu_3_4; Table D
  source 1..15: note = Severe acute respiratory syndrome coronavirus 2
HADQLTPTWRVYSTG

SEQ ID NO: 27337 - protein, 15 aa, Severe acute respiratory syndrome-related coronavirus
  REGION 1..15: note = Spike Wuhan D614G; S_Wu_3_4; Table D
  source 1..15: note = Severe acute respiratory syndrome coronavirus 2
LTPTWRVYSTGSNVF

SEQ ID NO: 27338 - protein, 15 aa, Severe acute respiratory syndrome-related coronavirus
  REGION 1..15: note = Spike Wuhan D614G; S_Wu_3_4; Table D
  source 1..15: note = Severe acute respiratory syndrome coronavirus 2
WRVYSTGSNVFQTRA

SEQ ID NO: 27339 - protein, 15 aa, Severe acute respiratory syndrome-related coronavirus
  REGION 1..15: note = Spike Wuhan D614G; S_Wu_3_4; Table D
  source 1..15: note = Severe acute respiratory syndrome coronavirus 2
STGSNVFQTRAGCLI

SEQ ID NO: 27340 - protein, 15 aa, Severe acute respiratory syndrome-related coronavirus
  REGION 1..15: note = Spike Wuhan D614G; S_Wu_5_6; Table D
  source 1..15: note = Severe acute respiratory syndrome coronavirus 2
NVFQTRAGCLIGAEH

SEQ ID NO: 27341 - protein, 15 aa, Severe acute respiratory syndrome-related coronavirus
  REGION 1..15: note = Spike Wuhan D614G; S_Wu_5_6; Table D
  source 1..15: note = Severe acute respiratory syndrome coronavirus 2
TRAGCLIGAEHVNNS

SEQ ID NO: 27342 - protein, 15 aa, Severe acute respiratory syndrome-related coronavirus
  REGION 1..15: note = Spike Wuhan D614G; S_Wu_5_6; Table D
  source 1..15: note = Severe acute respiratory syndrome coronavirus 2
CLIGAEHVNNSYECD

SEQ ID NO: 27343 - protein, 15 aa, Severe acute respiratory syndrome-related coronavirus
  REGION 1..15: note = Spike Wuhan D614G; S_Wu_5_6; Table D
  source 1..15: note = Severe acute respiratory syndrome coronavirus 2
AEHVNNSYECDIPIG

SEQ ID NO: 27344 - protein, 15 aa, Severe acute respiratory syndrome-related coronavirus
  REGION 1..15: note = Spike Wuhan D614G; S_Wu_5_6; Table D
  source 1..15: note = Severe acute respiratory syndrome coronavirus 2
NNSYECDIPIGAGIC

SEQ ID NO: 27345 - protein, 15 aa, Severe acute respiratory syndrome-related coronavirus
  REGION 1..15: note = Spike Wuhan D614G; S_Wu_5_6; Table D
  source 1..15: note = Severe acute respiratory syndrome coronavirus 2
ECDIPIGAGICASYQ

SEQ ID NO: 27346 - protein, 15 aa, Severe acute respiratory syndrome-related coronavirus
  REGION 1..15: note = Spike Wuhan D614G; S_Wu_5_6; Table D
  source 1..15: note = Severe acute respiratory syndrome coronavirus 2
PIGAGICASYQTQTN

SEQ ID NO: 27347 - protein, 15 aa, Severe acute respiratory syndrome-related coronavirus
  REGION 1..15: note = Spike Wuhan D614G; S_Wu_5_6; Table D
  source 1..15: note = Severe acute respiratory syndrome coronavirus 2
GICASYQTQTNSPRR

SEQ ID NO: 27348 - protein, 15 aa, Severe acute respiratory syndrome-related coronavirus
  REGION 1..15: note = Spike Wuhan D614G; S_Wu_5_6; Table D
  source 1..15: note = Severe acute respiratory syndrome coronavirus 2
SYQTQTNSPRRARSV

SEQ ID NO: 27349 - protein, 15 aa, Severe acute respiratory syndrome-related coronavirus
  REGION 1..15: note = Spike Wuhan D614G; S_Wu_5_6; Table D
  source 1..15: note = Severe acute respiratory syndrome coronavirus 2
QTNSPRRARSVASQS

SEQ ID NO: 27350 - protein, 15 aa, Severe acute respiratory syndrome-related coronavirus
  REGION 1..15: note = Spike Wuhan D614G; S_Wu_5_6; Table D
  source 1..15: note = Severe acute respiratory syndrome coronavirus 2
PRRARSVASQSIIAY

SEQ ID NO: 27351 - protein, 15 aa, Severe acute respiratory syndrome-related coronavirus
  REGION 1..15: note = Spike Wuhan D614G; S_Wu_5_6; Table D
  source 1..15: note = Severe acute respiratory syndrome coronavirus 2
RSVASQSIIAYTMSL

SEQ ID NO: 27352 - protein, 15 aa, Severe acute respiratory syndrome-related coronavirus
  REGION 1..15: note = Spike Wuhan D614G; S_Wu_5_6; Table D
  source 1..15: note = Severe acute respiratory syndrome coronavirus 2
SQSIIAYTMSLGAEN

SEQ ID NO: 27353 - protein, 15 aa, Severe acute respiratory syndrome-related coronavirus
  REGION 1..15: note = Spike Wuhan D614G; S_Wu_5_6; Table D
  source 1..15: note = Severe acute respiratory syndrome coronavirus 2
IAYTMSLGAENSVAY

SEQ ID NO: 27354 - protein, 15 aa, Severe acute respiratory syndrome-related coronavirus
  REGION 1..15: note = Spike Wuhan D614G; S_Wu_5_6; Table D
  source 1..15: note = Severe acute respiratory syndrome coronavirus 2
MSLGAENSVAYSNNS

SEQ ID NO: 27355 - protein, 15 aa, Severe acute respiratory syndrome-related coronavirus
  REGION 1..15: note = Spike Wuhan D614G; S_Wu_5_6; Table D
  source 1..15: note = Severe acute respiratory syndrome coronavirus 2
AENSVAYSNNSIAIP

SEQ ID NO: 27356 - protein, 15 aa, Severe acute respiratory syndrome-related coronavirus
  REGION 1..15: note = Spike Wuhan D614G; S_Wu_5_6; Table D
  source 1..15: note = Severe acute respiratory syndrome coronavirus 2
VAYSNNSIAIPTNFT

SEQ ID NO: 27357 - protein, 15 aa, Severe acute respiratory syndrome-related coronavirus
  REGION 1..15: note = Spike Wuhan D614G; S_Wu_5_6; Table D
  source 1..15: note = Severe acute respiratory syndrome coronavirus 2
NNSIAIPTNFTISVT

SEQ ID NO: 27358 - protein, 15 aa, Severe acute respiratory syndrome-related coronavirus
  REGION 1..15: note = Spike Wuhan D614G; S_Wu_5_6; Table D
  source 1..15: note = Severe acute respiratory syndrome coronavirus 2
AIPTNFTISVTTEIL

SEQ ID NO: 27359 - protein, 15 aa, Severe acute respiratory syndrome-related coronavirus
  REGION 1..15: note = Spike Wuhan D614G; S_Wu_5_6; Table D
  source 1..15: note = Severe acute respiratory syndrome coronavirus 2
NFTISVTTEILPVSM

SEQ ID NO: 27360 - protein, 15 aa, Severe acute respiratory syndrome-related coronavirus
  REGION 1..15: note = Spike Wuhan D614G; S_Wu_5_6; Table D
  source 1..15: note = Severe acute respiratory syndrome coronavirus 2
SVTTEILPVSMTKTS

SEQ ID NO: 27361 - protein, 15 aa, Severe acute respiratory syndrome-related coronavirus
  REGION 1..15: note = Spike Wuhan D614G; S_Wu_5_6; Table D
  source 1..15: note = Severe acute respiratory syndrome coronavirus 2
EILPVSMTKTSVDCT

SEQ ID NO: 27362 - protein, 15 aa, Severe acute respiratory syndrome-related coronavirus
  REGION 1..15: note = Spike Wuhan D614G; S_Wu_5_6; Table D
  source 1..15: note = Severe acute respiratory syndrome coronavirus 2
VSMTKTSVDCTMYIC

SEQ ID NO: 27363 - protein, 15 aa, Severe acute respiratory syndrome-related coronavirus
  REGION 1..15: note = Spike Wuhan D614G; S_Wu_5_6; Table D
  source 1..15: note = Severe acute respiratory syndrome coronavirus 2
KTSVDCTMYICGDST

SEQ ID NO: 27364 - protein, 15 aa, Severe acute respiratory syndrome-related coronavirus
  REGION 1..15: note = Spike Wuhan D614G; S_Wu_5_6; Table D
  source 1..15: note = Severe acute respiratory syndrome coronavirus 2
DCTMYICGDSTECSN

SEQ ID NO: 27365 - protein, 15 aa, Severe acute respiratory syndrome-related coronavirus
  REGION 1..15: note = Spike Wuhan D614G; S_Wu_5_6; Table D
  source 1..15: note = Severe acute respiratory syndrome coronavirus 2
YICGDSTECSNLLLQ

SEQ ID NO: 27366 - protein, 15 aa, Severe acute respiratory syndrome-related coronavirus
  REGION 1..15: note = Spike Wuhan D614G; S_Wu_5_6; Table D
  source 1..15: note = Severe acute respiratory syndrome coronavirus 2
DSTECSNLLLQYGSF

SEQ ID NO: 27367 - protein, 15 aa, Severe acute respiratory syndrome-related coronavirus
  REGION 1..15: note = Spike Wuhan D614G; S_Wu_5_6; Table D
  source 1..15: note = Severe acute respiratory syndrome coronavirus 2
CSNLLLQYGSFCTQL

SEQ ID NO: 27368 - protein, 15 aa, Severe acute respiratory syndrome-related coronavirus
  REGION 1..15: note = Spike Wuhan D614G; S_Wu_5_6; Table D
  source 1..15: note = Severe acute respiratory syndrome coronavirus 2
LLQYGSFCTQLNRAL

SEQ ID NO: 27369 - protein, 15 aa, Severe acute respiratory syndrome-related coronavirus
  REGION 1..15: note = Spike Wuhan D614G; S_Wu_5_6; Table D
  source 1..15: note = Severe acute respiratory syndrome coronavirus 2
GSFCTQLNRALTGIA

SEQ ID NO: 27370 - protein, 15 aa, Severe acute respiratory syndrome-related coronavirus
  REGION 1..15: note = Spike Wuhan D614G; S_Wu_5_6; Table D
  source 1..15: note = Severe acute respiratory syndrome coronavirus 2
TQLNRALTGIAVEQD

SEQ ID NO: 27371 - protein, 15 aa, Severe acute respiratory syndrome-related coronavirus
  REGION 1..15: note = Spike Wuhan D614G; S_Wu_5_6; Table D
  source 1..15: note = Severe acute respiratory syndrome coronavirus 2
RALTGIAVEQDKNTQ

SEQ ID NO: 27372 - protein, 15 aa, Severe acute respiratory syndrome-related coronavirus
  REGION 1..15: note = Spike Wuhan D614G; S_Wu_5_6; Table D
  source 1..15: note = Severe acute respiratory syndrome coronavirus 2
GIAVEQDKNTQEVFA

SEQ ID NO: 27373 - protein, 15 aa, Severe acute respiratory syndrome-related coronavirus
  REGION 1..15: note = Spike Wuhan D614G; S_Wu_5_6; Table D
  source 1..15: note = Severe acute respiratory syndrome coronavirus 2
EQDKNTQEVFAQVKQ

SEQ ID NO: 27374 - protein, 15 aa, Severe acute respiratory syndrome-related coronavirus
  REGION 1..15: note = Spike Wuhan D614G; S_Wu_5_6; Table D
  source 1..15: note = Severe acute respiratory syndrome coronavirus 2
NTQEVFAQVKQIYKT

SEQ ID NO: 27375 - protein, 15 aa, Severe acute respiratory syndrome-related coronavirus
  REGION 1..15: note = Spike Wuhan D614G; S_Wu_5_6; Table D
  source 1..15: note = Severe acute respiratory syndrome coronavirus 2
VFAQVKQIYKTPPIK

SEQ ID NO: 27376 - protein, 15 aa, Severe acute respiratory syndrome-related coronavirus
  REGION 1..15: note = Spike Wuhan D614G; S_Wu_5_6; Table D
  source 1..15: note = Severe acute respiratory syndrome coronavirus 2
VKQIYKTPPIKDFGG

SEQ ID NO: 27377 - protein, 15 aa, Severe acute respiratory syndrome-related coronavirus
  REGION 1..15: note = Spike Wuhan D614G; S_Wu_5_6; Table D
  source 1..15: note = Severe acute respiratory syndrome coronavirus 2
YKTPPIKDFGGFNFS

SEQ ID NO: 27378 - protein, 15 aa, Severe acute respiratory syndrome-related coronavirus
  REGION 1..15: note = Spike Wuhan D614G; S_Wu_5_6; Table D
  source 1..15: note = Severe acute respiratory syndrome coronavirus 2
PIKDFGGFNFSQILP

SEQ ID NO: 27379 - protein, 15 aa, Severe acute respiratory syndrome-related coronavirus
  REGION 1..15: note = Spike Wuhan D614G; S_Wu_5_6; Table D
  source 1..15: note = Severe acute respiratory syndrome coronavirus 2
FGGFNFSQILPDPSK

SEQ ID NO: 27380 - protein, 15 aa, Severe acute respiratory syndrome-related coronavirus
  REGION 1..15: note = Spike Wuhan D614G; S_Wu_5_6; Table D
  source 1..15: note = Severe acute respiratory syndrome coronavirus 2
NFSQILPDPSKPSKR

SEQ ID NO: 27381 - protein, 15 aa, Severe acute respiratory syndrome-related coronavirus
  REGION 1..15: note = Spike Wuhan D614G; S_Wu_5_6; Table D
  source 1..15: note = Severe acute respiratory syndrome coronavirus 2
ILPDPSKPSKRSFIE

SEQ ID NO: 27382 - protein, 15 aa, Severe acute respiratory syndrome-related coronavirus
  REGION 1..15: note = Spike Wuhan D614G; S_Wu_5_6; Table D
  source 1..15: note = Severe acute respiratory syndrome coronavirus 2
PSKPSKRSFIEDLLF

SEQ ID NO: 27383 - protein, 15 aa, Severe acute respiratory syndrome-related coronavirus
  REGION 1..15: note = Spike Wuhan D614G; S_Wu_5_6; Table D
  source 1..15: note = Severe acute respiratory syndrome coronavirus 2
SKRSFIEDLLFNKVT

SEQ ID NO: 27384 - protein, 15 aa, Severe acute respiratory syndrome-related coronavirus
  REGION 1..15: note = Spike Wuhan D614G; S_Wu_5_6; Table D
  source 1..15: note = Severe acute respiratory syndrome coronavirus 2
FIEDLLFNKVTLADA

SEQ ID NO: 27385 - protein, 15 aa, Severe acute respiratory syndrome-related coronavirus
  REGION 1..15: note = Spike Wuhan D614G; S_Wu_5_6; Table D
  source 1..15: note = Severe acute respiratory syndrome coronavirus 2
LLFNKVTLADAGFIK

SEQ ID NO: 27386 - protein, 15 aa, Severe acute respiratory syndrome-related coronavirus
  REGION 1..15: note = Spike Wuhan D614G; S_Wu_5_6; Table D
  source 1..15: note = Severe acute respiratory syndrome coronavirus 2
KVTLADAGFIKQYGD

SEQ ID NO: 27387 - protein, 15 aa, Severe acute respiratory syndrome-related coronavirus
  REGION 1..15: note = Spike Wuhan D614G; S_Wu_5_6; Table D
  source 1..15: note = Severe acute respiratory syndrome coronavirus 2
ADAGFIKQYGDCLGD

SEQ ID NO: 27388 - protein, 15 aa, Severe acute respiratory syndrome-related coronavirus
  REGION 1..15: note = Spike Wuhan D614G; S_Wu_5_6; Table D
  source 1..15: note = Severe acute respiratory syndrome coronavirus 2
FIKQYGDCLGDIAAR

SEQ ID NO: 27389 - protein, 15 aa, Severe acute respiratory syndrome-related coronavirus
  REGION 1..15: note = Spike Wuhan D614G; S_Wu_5_6; Table D
  source 1..15: note = Severe acute respiratory syndrome coronavirus 2
YGDCLGDIAARDLIC

SEQ ID NO: 27390 - protein, 15 aa, Severe acute respiratory syndrome-related coronavirus
  REGION 1..15: note = Spike Wuhan D614G; S_Wu_5_6; Table D
  source 1..15: note = Severe acute respiratory syndrome coronavirus 2
LGDIAARDLICAQKF

SEQ ID NO: 27391 - protein, 15 aa, Severe acute respiratory syndrome-related coronavirus
  REGION 1..15: note = Spike Wuhan D614G; S_Wu_5_6; Table D
  source 1..15: note = Severe acute respiratory syndrome coronavirus 2
AARDLICAQKFNGLT

SEQ ID NO: 27392 - protein, 15 aa, Severe acute respiratory syndrome-related coronavirus
  REGION 1..15: note = Spike Wuhan D614G; S_Wu_5_6; Table D
  source 1..15: note = Severe acute respiratory syndrome coronavirus 2
LICAQKFNGLTVLPP

SEQ ID NO: 27393 - protein, 15 aa, Severe acute respiratory syndrome-related coronavirus
  REGION 1..15: note = Spike Wuhan D614G; S_Wu_5_6; Table D
  source 1..15: note = Severe acute respiratory syndrome coronavirus 2
QKFNGLTVLPPLLTD

SEQ ID NO: 27394 - protein, 15 aa, Severe acute respiratory syndrome-related coronavirus
  REGION 1..15: note = Spike Wuhan D614G; S_Wu_5_6; Table D
  source 1..15: note = Severe acute respiratory syndrome coronavirus 2
GLTVLPPLLTDEMIA

SEQ ID NO: 27395 - protein, 15 aa, Severe acute respiratory syndrome-related coronavirus
  REGION 1..15: note = Spike Wuhan D614G; S_Wu_5_6; Table D
  source 1..15: note = Severe acute respiratory syndrome coronavirus 2
LPPLLTDEMIAQYTS

SEQ ID NO: 27396 - protein, 15 aa, Severe acute respiratory syndrome-related coronavirus
  REGION 1..15: note = Spike Wuhan D614G; S_Wu_5_6; Table D
  source 1..15: note = Severe acute respiratory syndrome coronavirus 2
LTDEMIAQYTSALLA

SEQ ID NO: 27397 - protein, 15 aa, Severe acute respiratory syndrome-related coronavirus
  REGION 1..15: note = Spike Wuhan D614G; S_Wu_5_6; Table D
  source 1..15: note = Severe acute respiratory syndrome coronavirus 2
MIAQYTSALLAGTIT

SEQ ID NO: 27398 - protein, 15 aa, Severe acute respiratory syndrome-related coronavirus
  REGION 1..15: note = Spike Wuhan D614G; S_Wu_5_6; Table D
  source 1..15: note = Severe acute respiratory syndrome coronavirus 2
YTSALLAGTITSGWT

SEQ ID NO: 27399 - protein, 15 aa, Severe acute respiratory syndrome-related coronavirus
  REGION 1..15: note = Spike Wuhan D614G; S_Wu_5_6; Table D
  source 1..15: note = Severe acute respiratory syndrome coronavirus 2
LLAGTITSGWTFGAG

SEQ ID NO: 27400 - protein, 15 aa, Severe acute respiratory syndrome-related coronavirus
  REGION 1..15: note = Spike Wuhan D614G; S_Wu_5_6; Table D
  source 1..15: note = Severe acute respiratory syndrome coronavirus 2
TITSGWTFGAGAALQ

SEQ ID NO: 27401 - protein, 15 aa, Severe acute respiratory syndrome-related coronavirus
  REGION 1..15: note = Spike Wuhan D614G; S_Wu_5_6; Table D
  source 1..15: note = Severe acute respiratory syndrome coronavirus 2
GWTFGAGAALQIPFA

SEQ ID NO: 27402 - protein, 15 aa, Severe acute respiratory syndrome-related coronavirus
  REGION 1..15: note = Spike Wuhan D614G; S_Wu_5_6; Table D
  source 1..15: note = Severe acute respiratory syndrome coronavirus 2
GAGAALQIPFAMQMA

SEQ ID NO: 27403 - protein, 15 aa, Severe acute respiratory syndrome-related coronavirus
  REGION 1..15: note = Spike Wuhan D614G; S_Wu_5_6; Table D
  source 1..15: note = Severe acute respiratory syndrome coronavirus 2
ALQIPFAMQMAYRFN

SEQ ID NO: 27404 - protein, 15 aa, Severe acute respiratory syndrome-related coronavirus
  REGION 1..15: note = Spike Wuhan D614G; S_Wu_5_6; Table D
  source 1..15: note = Severe acute respiratory syndrome coronavirus 2
PFAMQMAYRFNGIGV

SEQ ID NO: 27405 - protein, 15 aa, Severe acute respiratory syndrome-related coronavirus
  REGION 1..15: note = Spike Wuhan D614G; S_Wu_5_6; Table D
  source 1..15: note = Severe acute respiratory syndrome coronavirus 2
QMAYRFNGIGVTQNV

SEQ ID NO: 27406 - protein, 15 aa, Severe acute respiratory syndrome-related coronavirus
  REGION 1..15: note = Spike Wuhan D614G; S_Wu_5_6; Table D
  source 1..15: note = Severe acute respiratory syndrome coronavirus 2
RFNGIGVTQNVLYEN

SEQ ID NO: 27407 - protein, 15 aa, Severe acute respiratory syndrome-related coronavirus
  REGION 1..15: note = Spike Wuhan D614G; S_Wu_5_6; Table D
  source 1..15: note = Severe acute respiratory syndrome coronavirus 2
IGVTQNVLYENQKLI

SEQ ID NO: 27408 - protein, 15 aa, Severe acute respiratory syndrome-related coronavirus
  REGION 1..15: note = Spike Wuhan D614G; S_Wu_5_6; Table D
  source 1..15: note = Severe acute respiratory syndrome coronavirus 2
QNVLYENQKLIANQF

SEQ ID NO: 27409 - protein, 15 aa, Severe acute respiratory syndrome-related coronavirus
  REGION 1..15: note = Spike Wuhan D614G; S_Wu_5_6; Table D
  source 1..15: note = Severe acute respiratory syndrome coronavirus 2
YENQKLIANQFNSAI

SEQ ID NO: 27410 - protein, 15 aa, Severe acute respiratory syndrome-related coronavirus
  REGION 1..15: note = Spike Wuhan D614G; S_Wu_5_6; Table D
  source 1..15: note = Severe acute respiratory syndrome coronavirus 2
KLIANQFNSAIGKIQ

SEQ ID NO: 27411 - protein, 15 aa, Severe acute respiratory syndrome-related coronavirus
  REGION 1..15: note = Spike Wuhan D614G; S_Wu_5_6; Table D
  source 1..15: note = Severe acute respiratory syndrome coronavirus 2
NQFNSAIGKIQDSLS

SEQ ID NO: 27412 - protein, 15 aa, Severe acute respiratory syndrome-related coronavirus
  REGION 1..15: note = Spike Wuhan D614G; S_Wu_5_6; Table D
  source 1..15: note = Severe acute respiratory syndrome coronavirus 2
SAIGKIQDSLSSTAS

SEQ ID NO: 27413 - protein, 15 aa, Severe acute respiratory syndrome-related coronavirus
  REGION 1..15: note = Spike Wuhan D614G; S_Wu_5_6; Table D
  source 1..15: note = Severe acute respiratory syndrome coronavirus 2
KIQDSLSSTASALGK

SEQ ID NO: 27414 - protein, 15 aa, Severe acute respiratory syndrome-related coronavirus
  REGION 1..15: note = Spike Wuhan D614G; S_Wu_5_6; Table D
  source 1..15: note = Severe acute respiratory syndrome coronavirus 2
SLSSTASALGKLQDV

SEQ ID NO: 27415 - protein, 15 aa, Severe acute respiratory syndrome-related coronavirus
  REGION 1..15: note = Spike Wuhan D614G; S_Wu_5_6; Table D
  source 1..15: note = Severe acute respiratory syndrome coronavirus 2
TASALGKLQDVVNQN

SEQ ID NO: 27416 - protein, 15 aa, Severe acute respiratory syndrome-related coronavirus
  REGION 1..15: note = Spike Wuhan D614G; S_Wu_5_6; Table D
  source 1..15: note = Severe acute respiratory syndrome coronavirus 2
LGKLQDVVNQNAQAL

SEQ ID NO: 27417 - protein, 15 aa, Severe acute respiratory syndrome-related coronavirus
  REGION 1..15: note = Spike Wuhan D614G; S_Wu_5_6; Table D
  source 1..15: note = Severe acute respiratory syndrome coronavirus 2
QDVVNQNAQALNTLV

SEQ ID NO: 27418 - protein, 15 aa, Severe acute respiratory syndrome-related coronavirus
  REGION 1..15: note = Spike Wuhan D614G; S_Wu_5_6; Table D
  source 1..15: note = Severe acute respiratory syndrome coronavirus 2
NQNAQALNTLVKQLS

SEQ ID NO: 27419 - protein, 15 aa, Severe acute respiratory syndrome-related coronavirus
  REGION 1..15: note = Spike Wuhan D614G; S_Wu_5_6; Table D
  source 1..15: note = Severe acute respiratory syndrome coronavirus 2
QALNTLVKQLSSNFG

SEQ ID NO: 27420 - protein, 15 aa, Severe acute respiratory syndrome-related coronavirus
  REGION 1..15: note = Spike Wuhan D614G; S_Wu_7_8; Table D
  source 1..15: note = Severe acute respiratory syndrome coronavirus 2
TLVKQLSSNFGAISS

SEQ ID NO: 27421 - protein, 15 aa, Severe acute respiratory syndrome-related coronavirus
  REGION 1..15: note = Spike Wuhan D614G; S_Wu_7_8; Table D
  source 1..15: note = Severe acute respiratory syndrome coronavirus 2
QLSSNFGAISSVLND

SEQ ID NO: 27422 - protein, 15 aa, Severe acute respiratory syndrome-related coronavirus
  REGION 1..15: note = Spike Wuhan D614G; S_Wu_7_8; Table D
  source 1..15: note = Severe acute respiratory syndrome coronavirus 2
NFGAISSVLNDILSR

SEQ ID NO: 27423 - protein, 15 aa, Severe acute respiratory syndrome-related coronavirus
  REGION 1..15: note = Spike Wuhan D614G; S_Wu_7_8; Table D
  source 1..15: note = Severe acute respiratory syndrome coronavirus 2
ISSVLNDILSRLDKV

SEQ ID NO: 27424 - protein, 15 aa, Severe acute respiratory syndrome-related coronavirus
  REGION 1..15: note = Spike Wuhan D614G; S_Wu_7_8; Table D
  source 1..15: note = Severe acute respiratory syndrome coronavirus 2
LNDILSRLDKVEAEV

SEQ ID NO: 27425 - protein, 15 aa, Severe acute respiratory syndrome-related coronavirus
  REGION 1..15: note = Spike Wuhan D614G; S_Wu_7_8; Table D
  source 1..15: note = Severe acute respiratory syndrome coronavirus 2
LSRLDKVEAEVQIDR

SEQ ID NO: 27426 - protein, 15 aa, Severe acute respiratory syndrome-related coronavirus
  REGION 1..15: note = Spike Wuhan D614G; S_Wu_7_8; Table D
  source 1..15: note = Severe acute respiratory syndrome coronavirus 2
DKVEAEVQIDRLITG

SEQ ID NO: 27427 - protein, 15 aa, Severe acute respiratory syndrome-related coronavirus
  REGION 1..15: note = Spike Wuhan D614G; S_Wu_7_8; Table D
  source 1..15: note = Severe acute respiratory syndrome coronavirus 2
AEVQIDRLITGRLQS

SEQ ID NO: 27428 - protein, 15 aa, Severe acute respiratory syndrome-related coronavirus
  REGION 1..15: note = Spike Wuhan D614G; S_Wu_7_8; Table D
  source 1..15: note = Severe acute respiratory syndrome coronavirus 2
IDRLITGRLQSLQTY

SEQ ID NO: 27429 - protein, 15 aa, Severe acute respiratory syndrome-related coronavirus
  REGION 1..15: note = Spike Wuhan D614G; S_Wu_7_8; Table D
  source 1..15: note = Severe acute respiratory syndrome coronavirus 2
ITGRLQSLQTYVTQQ

SEQ ID NO: 27430 - protein, 15 aa, Severe acute respiratory syndrome-related coronavirus
  REGION 1..15: note = Spike Wuhan D614G; S_Wu_7_8; Table D
  source 1..15: note = Severe acute respiratory syndrome coronavirus 2
LQSLQTYVTQQLIRA

SEQ ID NO: 27431 - protein, 15 aa, Severe acute respiratory syndrome-related coronavirus
  REGION 1..15: note = Spike Wuhan D614G; S_Wu_7_8; Table D
  source 1..15: note = Severe acute respiratory syndrome coronavirus 2
QTYVTQQLIRAAEIR

SEQ ID NO: 27432 - protein, 15 aa, Severe acute respiratory syndrome-related coronavirus
  REGION 1..15: note = Spike Wuhan D614G; S_Wu_7_8; Table D
  source 1..15: note = Severe acute respiratory syndrome coronavirus 2
TQQLIRAAEIRASAN

SEQ ID NO: 27433 - protein, 15 aa, Severe acute respiratory syndrome-related coronavirus
  REGION 1..15: note = Spike Wuhan D614G; S_Wu_7_8; Table D
  source 1..15: note = Severe acute respiratory syndrome coronavirus 2
IRAAEIRASANLAAT

SEQ ID NO: 27434 - protein, 15 aa, Severe acute respiratory syndrome-related coronavirus
  REGION 1..15: note = Spike Wuhan D614G; S_Wu_7_8; Table D
  source 1..15: note = Severe acute respiratory syndrome coronavirus 2
EIRASANLAATKMSE

SEQ ID NO: 27435 - protein, 15 aa, Severe acute respiratory syndrome-related coronavirus
  REGION 1..15: note = Spike Wuhan D614G; S_Wu_7_8; Table D
  source 1..15: note = Severe acute respiratory syndrome coronavirus 2
SANLAATKMSECVLG

SEQ ID NO: 27436 - protein, 15 aa, Severe acute respiratory syndrome-related coronavirus
  REGION 1..15: note = Spike Wuhan D614G; S_Wu_7_8; Table D
  source 1..15: note = Severe acute respiratory syndrome coronavirus 2
AATKMSECVLGQSKR

SEQ ID NO: 27437 - protein, 15 aa, Severe acute respiratory syndrome-related coronavirus
  REGION 1..15: note = Spike Wuhan D614G; S_Wu_7_8; Table D
  source 1..15: note = Severe acute respiratory syndrome coronavirus 2
MSECVLGQSKRVDFC

SEQ ID NO: 27438 - protein, 15 aa, Severe acute respiratory syndrome-related coronavirus
  REGION 1..15: note = Spike Wuhan D614G; S_Wu_7_8; Table D
  source 1..15: note = Severe acute respiratory syndrome coronavirus 2
VLGQSKRVDFCGKGY

SEQ ID NO: 27439 - protein, 15 aa, Severe acute respiratory syndrome-related coronavirus
  REGION 1..15: note = Spike Wuhan D614G; S_Wu_7_8; Table D
  source 1..15: note = Severe acute respiratory syndrome coronavirus 2
SKRVDFCGKGYHLMS

SEQ ID NO: 27440 - protein, 15 aa, Severe acute respiratory syndrome-related coronavirus
  REGION 1..15: note = Spike Wuhan D614G; S_Wu_7_8; Table D
  source 1..15: note = Severe acute respiratory syndrome coronavirus 2
DFCGKGYHLMSFPQS

SEQ ID NO: 27441 - protein, 15 aa, Severe acute respiratory syndrome-related coronavirus
  REGION 1..15: note = Spike Wuhan D614G; S_Wu_7_8; Table D
  source 1..15: note = Severe acute respiratory syndrome coronavirus 2
KGYHLMSFPQSAPHG

SEQ ID NO: 27442 - protein, 15 aa, Severe acute respiratory syndrome-related coronavirus
  REGION 1..15: note = Spike Wuhan D614G; S_Wu_7_8; Table D
  source 1..15: note = Severe acute respiratory syndrome coronavirus 2
LMSFPQSAPHGVVFL

SEQ ID NO: 27443 - protein, 15 aa, Severe acute respiratory syndrome-related coronavirus
  REGION 1..15: note = Spike Wuhan D614G; S_Wu_7_8; Table D
  source 1..15: note = Severe acute respiratory syndrome coronavirus 2
PQSAPHGVVFLHVTY

SEQ ID NO: 27444 - protein, 15 aa, Severe acute respiratory syndrome-related coronavirus
  REGION 1..15: note = Spike Wuhan D614G; S_Wu_7_8; Table D
  source 1..15: note = Severe acute respiratory syndrome coronavirus 2
PHGVVFLHVTYVPAQ

SEQ ID NO: 27445 - protein, 15 aa, Severe acute respiratory syndrome-related coronavirus
  REGION 1..15: note = Spike Wuhan D614G; S_Wu_7_8; Table D
  source 1..15: note = Severe acute respiratory syndrome coronavirus 2
VFLHVTYVPAQEKNF

SEQ ID NO: 27446 - protein, 15 aa, Severe acute respiratory syndrome-related coronavirus
  REGION 1..15: note = Spike Wuhan D614G; S_Wu_7_8; Table D
  source 1..15: note = Severe acute respiratory syndrome coronavirus 2
VTYVPAQEKNFTTAP

SEQ ID NO: 27447 - protein, 15 aa, Severe acute respiratory syndrome-related coronavirus
  REGION 1..15: note = Spike Wuhan D614G; S_Wu_7_8; Table D
  source 1..15: note = Severe acute respiratory syndrome coronavirus 2
PAQEKNFTTAPAICH

SEQ ID NO: 27448 - protein, 15 aa, Severe acute respiratory syndrome-related coronavirus
  REGION 1..15: note = Spike Wuhan D614G; S_Wu_7_8; Table D
  source 1..15: note = Severe acute respiratory syndrome coronavirus 2
KNFTTAPAICHDGKA

SEQ ID NO: 27449 - protein, 15 aa, Severe acute respiratory syndrome-related coronavirus
  REGION 1..15: note = Spike Wuhan D614G; S_Wu_7_8; Table D
  source 1..15: note = Severe acute respiratory syndrome coronavirus 2
TAPAICHDGKAHFPR

SEQ ID NO: 27450 - protein, 15 aa, Severe acute respiratory syndrome-related coronavirus
  REGION 1..15: note = Spike Wuhan D614G; S_Wu_7_8; Table D
  source 1..15: note = Severe acute respiratory syndrome coronavirus 2
ICHDGKAHFPREGVF

SEQ ID NO: 27451 - protein, 15 aa, Severe acute respiratory syndrome-related coronavirus
  REGION 1..15: note = Spike Wuhan D614G; S_Wu_7_8; Table D
  source 1..15: note = Severe acute respiratory syndrome coronavirus 2
GKAHFPREGVFVSNG

SEQ ID NO: 27452 - protein, 15 aa, Severe acute respiratory syndrome-related coronavirus
  REGION 1..15: note = Spike Wuhan D614G; S_Wu_7_8; Table D
  source 1..15: note = Severe acute respiratory syndrome coronavirus 2
FPREGVFVSNGTHWF

SEQ ID NO: 27453 - protein, 15 aa, Severe acute respiratory syndrome-related coronavirus
  REGION 1..15: note = Spike Wuhan D614G; S_Wu_7_8; Table D
  source 1..15: note = Severe acute respiratory syndrome coronavirus 2
GVFVSNGTHWFVTQR

SEQ ID NO: 27454 - protein, 15 aa, Severe acute respiratory syndrome-related coronavirus
  REGION 1..15: note = Spike Wuhan D614G; S_Wu_7_8; Table D
  source 1..15: note = Severe acute respiratory syndrome coronavirus 2
SNGTHWFVTQRNFYE

SEQ ID NO: 27455 - protein, 15 aa, Severe acute respiratory syndrome-related coronavirus
  REGION 1..15: note = Spike Wuhan D614G; S_Wu_7_8; Table D
  source 1..15: note = Severe acute respiratory syndrome coronavirus 2
HWFVTQRNFYEPQII

SEQ ID NO: 27456 - protein, 15 aa, Severe acute respiratory syndrome-related coronavirus
  REGION 1..15: note = Spike Wuhan D614G; S_Wu_7_8; Table D
  source 1..15: note = Severe acute respiratory syndrome coronavirus 2
TQRNFYEPQIITTDN

SEQ ID NO: 27457 - protein, 15 aa, Severe acute respiratory syndrome-related coronavirus
  REGION 1..15: note = Spike Wuhan D614G; S_Wu_7_8; Table D
  source 1..15: note = Severe acute respiratory syndrome coronavirus 2
FYEPQIITTDNTFVS

SEQ ID NO: 27458 - protein, 15 aa, Severe acute respiratory syndrome-related coronavirus
  REGION 1..15: note = Spike Wuhan D614G; S_Wu_7_8; Table D
  source 1..15: note = Severe acute respiratory syndrome coronavirus 2
QIITTDNTFVSGNCD

SEQ ID NO: 27459 - protein, 15 aa, Severe acute respiratory syndrome-related coronavirus
  REGION 1..15: note = Spike Wuhan D614G; S_Wu_7_8; Table D
  source 1..15: note = Severe acute respiratory syndrome coronavirus 2
TDNTFVSGNCDVVIG

SEQ ID NO: 27460 - protein, 15 aa, Severe acute respiratory syndrome-related coronavirus
  REGION 1..15: note = Spike Wuhan D614G; S_Wu_7_8; Table D
  source 1..15: note = Severe acute respiratory syndrome coronavirus 2
FVSGNCDVVIGIVNN

SEQ ID NO: 27461 - protein, 15 aa, Severe acute respiratory syndrome-related coronavirus
  REGION 1..15: note = Spike Wuhan D614G; S_Wu_7_8; Table D
  source 1..15: note = Severe acute respiratory syndrome coronavirus 2
NCDVVIGIVNNTVYD

SEQ ID NO: 27462 - protein, 15 aa, Severe acute respiratory syndrome-related coronavirus
  REGION 1..15: note = Spike Wuhan D614G; S_Wu_7_8; Table D
  source 1..15: note = Severe acute respiratory syndrome coronavirus 2
VIGIVNNTVYDPLQP

SEQ ID NO: 27463 - protein, 15 aa, Severe acute respiratory syndrome-related coronavirus
  REGION 1..15: note = Spike Wuhan D614G; S_Wu_7_8; Table D
  source 1..15: note = Severe acute respiratory syndrome coronavirus 2
VNNTVYDPLQPELDS

SEQ ID NO: 27464 - protein, 15 aa, Severe acute respiratory syndrome-related coronavirus
  REGION 1..15: note = Spike Wuhan D614G; S_Wu_7_8; Table D
  source 1..15: note = Severe acute respiratory syndrome coronavirus 2
VYDPLQPELDSFKEE

SEQ ID NO: 27465 - protein, 15 aa, Severe acute respiratory syndrome-related coronavirus
  REGION 1..15: note = Spike Wuhan D614G; S_Wu_7_8; Table D
  source 1..15: note = Severe acute respiratory syndrome coronavirus 2
LQPELDSFKEELDKY

SEQ ID NO: 27466 - protein, 15 aa, Severe acute respiratory syndrome-related coronavirus
  REGION 1..15: note = Spike Wuhan D614G; S_Wu_7_8; Table D
  source 1..15: note = Severe acute respiratory syndrome coronavirus 2
LDSFKEELDKYFKNH

SEQ ID NO: 27467 - protein, 15 aa, Severe acute respiratory syndrome-related coronavirus
  REGION 1..15: note = Spike Wuhan D614G; S_Wu_7_8; Table D
  source 1..15: note = Severe acute respiratory syndrome coronavirus 2
KEELDKYFKNHTSPD

SEQ ID NO: 27468 - protein, 15 aa, Severe acute respiratory syndrome-related coronavirus
  REGION 1..15: note = Spike Wuhan D614G; S_Wu_7_8; Table D
  source 1..15: note = Severe acute respiratory syndrome coronavirus 2
DKYFKNHTSPDVDLG

SEQ ID NO: 27469 - protein, 15 aa, Severe acute respiratory syndrome-related coronavirus
  REGION 1..15: note = Spike Wuhan D614G; S_Wu_7_8; Table D
  source 1..15: note = Severe acute respiratory syndrome coronavirus 2
KNHTSPDVDLGDISG

SEQ ID NO: 27470 - protein, 15 aa, Severe acute respiratory syndrome-related coronavirus
  REGION 1..15: note = Spike Wuhan D614G; S_Wu_7_8; Table D
  source 1..15: note = Severe acute respiratory syndrome coronavirus 2
SPDVDLGDISGINAS

SEQ ID NO: 27471 - protein, 15 aa, Severe acute respiratory syndrome-related coronavirus
  REGION 1..15: note = Spike Wuhan D614G; S_Wu_7_8; Table D
  source 1..15: note = Severe acute respiratory syndrome coronavirus 2
DLGDISGINASVVNI

SEQ ID NO: 27472 - protein, 15 aa, Severe acute respiratory syndrome-related coronavirus
  REGION 1..15: note = Spike Wuhan D614G; S_Wu_7_8; Table D
  source 1..15: note = Severe acute respiratory syndrome coronavirus 2
ISGINASVVNIQKEI

SEQ ID NO: 27473 - protein, 15 aa, Severe acute respiratory syndrome-related coronavirus
  REGION 1..15: note = Spike Wuhan D614G; S_Wu_7_8; Table D
  source 1..15: note = Severe acute respiratory syndrome coronavirus 2
NASVVNIQKEIDRLN

SEQ ID NO: 27474 - protein, 15 aa, Severe acute respiratory syndrome-related coronavirus
  REGION 1..15: note = Spike Wuhan D614G; S_Wu_7_8; Table D
  source 1..15: note = Severe acute respiratory syndrome coronavirus 2
VNIQKEIDRLNEVAK

SEQ ID NO: 27475 - protein, 15 aa, Severe acute respiratory syndrome-related coronavirus
  REGION 1..15: note = Spike Wuhan D614G; S_Wu_7_8; Table D
  source 1..15: note = Severe acute respiratory syndrome coronavirus 2
KEIDRLNEVAKNLNE

SEQ ID NO: 27476 - protein, 15 aa, Severe acute respiratory syndrome-related coronavirus
  REGION 1..15: note = Spike Wuhan D614G; S_Wu_7_8; Table D
  source 1..15: note = Severe acute respiratory syndrome coronavirus 2
RLNEVAKNLNESLID

SEQ ID NO: 27477 - protein, 15 aa, Severe acute respiratory syndrome-related coronavirus
  REGION 1..15: note = Spike Wuhan D614G; S_Wu_7_8; Table D
  source 1..15: note = Severe acute respiratory syndrome coronavirus 2
VAKNLNESLIDLQEL

SEQ ID NO: 27478 - protein, 15 aa, Severe acute respiratory syndrome-related coronavirus
  REGION 1..15: note = Spike Wuhan D614G; S_Wu_7_8; Table D
  source 1..15: note = Severe acute respiratory syndrome coronavirus 2
LNESLIDLQELGKYE

SEQ ID NO: 27479 - protein, 15 aa, Severe acute respiratory syndrome-related coronavirus
  REGION 1..15: note = Spike Wuhan D614G; S_Wu_7_8; Table D
  source 1..15: note = Severe acute respiratory syndrome coronavirus 2
LIDLQELGKYEQYIK

SEQ ID NO: 27480 - protein, 15 aa, Severe acute respiratory syndrome-related coronavirus
  REGION 1..15: note = Spike Wuhan D614G; S_Wu_7_8; Table D
  source 1..15: note = Severe acute respiratory syndrome coronavirus 2
QELGKYEQYIKWPWY

SEQ ID NO: 27481 - protein, 15 aa, Severe acute respiratory syndrome-related coronavirus
  REGION 1..15: note = Spike Wuhan D614G; S_Wu_7_8; Table D
  source 1..15: note = Severe acute respiratory syndrome coronavirus 2
KYEQYIKWPWYIWLG

SEQ ID NO: 27482 - protein, 15 aa, Severe acute respiratory syndrome-related coronavirus
  REGION 1..15: note = Spike Wuhan D614G; S_Wu_7_8; Table D
  source 1..15: note = Severe acute respiratory syndrome coronavirus 2
YIKWPWYIWLGFIAG

SEQ ID NO: 27483 - protein, 15 aa, Severe acute respiratory syndrome-related coronavirus
  REGION 1..15: note = Spike Wuhan D614G; S_Wu_7_8; Table D
  source 1..15: note = Severe acute respiratory syndrome coronavirus 2
PWYIWLGFIAGLIAI

SEQ ID NO: 27484 - protein, 15 aa, Severe acute respiratory syndrome-related coronavirus
  REGION 1..15: note = Spike Wuhan D614G; S_Wu_7_8; Table D
  source 1..15: note = Severe acute respiratory syndrome coronavirus 2
WLGFIAGLIAIVMVT

SEQ ID NO: 27485 - protein, 15 aa, Severe acute respiratory syndrome-related coronavirus
  REGION 1..15: note = Spike Wuhan D614G; S_Wu_7_8; Table D
  source 1..15: note = Severe acute respiratory syndrome coronavirus 2
IAGLIAIVMVTIMLC

SEQ ID NO: 27486 - protein, 15 aa, Severe acute respiratory syndrome-related coronavirus
  REGION 1..15: note = Spike Wuhan D614G; S_Wu_7_8; Table D
  source 1..15: note = Severe acute respiratory syndrome coronavirus 2
IAIVMVTIMLCCMTS

SEQ ID NO: 27487 - protein, 15 aa, Severe acute respiratory syndrome-related coronavirus
  REGION 1..15: note = Spike Wuhan D614G; S_Wu_7_8; Table D
  source 1..15: note = Severe acute respiratory syndrome coronavirus 2
MVTIMLCCMTSCCSC

SEQ ID NO: 27488 - protein, 15 aa, Severe acute respiratory syndrome-related coronavirus
  REGION 1..15: note = Spike Wuhan D614G; S_Wu_7_8; Table D
  source 1..15: note = Severe acute respiratory syndrome coronavirus 2
MLCCMTSCCSCLKGC

SEQ ID NO: 27489 - protein, 15 aa, Severe acute respiratory syndrome-related coronavirus
  REGION 1..15: note = Spike Wuhan D614G; S_Wu_7_8; Table D
  source 1..15: note = Severe acute respiratory syndrome coronavirus 2
MTSCCSCLKGCCSCG

SEQ ID NO: 27490 - protein, 15 aa, Severe acute respiratory syndrome-related coronavirus
  REGION 1..15: note = Spike Wuhan D614G; S_Wu_7_8; Table D
  source 1..15: note = Severe acute respiratory syndrome coronavirus 2
CSCLKGCCSCGSCCK

SEQ ID NO: 27491 - protein, 15 aa, Severe acute respiratory syndrome-related coronavirus
  REGION 1..15: note = Spike Wuhan D614G; S_Wu_7_8; Table D
  source 1..15: note = Severe acute respiratory syndrome coronavirus 2
KGCCSCGSCCKFDED

SEQ ID NO: 27492 - protein, 15 aa, Severe acute respiratory syndrome-related coronavirus
  REGION 1..15: note = Spike Wuhan D614G; S_Wu_7_8; Table D
  source 1..15: note = Severe acute respiratory syndrome coronavirus 2
SCGSCCKFDEDDSEP

SEQ ID NO: 27493 - protein, 15 aa, Severe acute respiratory syndrome-related coronavirus
  REGION 1..15: note = Spike Wuhan D614G; S_Wu_7_8; Table D
  source 1..15: note = Severe acute respiratory syndrome coronavirus 2
CCKFDEDDSEPVLKG

SEQ ID NO: 27494 - protein, 15 aa, Severe acute respiratory syndrome-related coronavirus
  REGION 1..15: note = Spike Wuhan D614G; S_Wu_7_8; Table D
  source 1..15: note = Severe acute respiratory syndrome coronavirus 2
DEDDSEPVLKGVKLH

SEQ ID NO: 27495 - protein, 13 aa, Severe acute respiratory syndrome-related coronavirus
  REGION 1..13: note = Spike Wuhan D614G; S_Wu_7_8; Table D
  source 1..13: note = Severe acute respiratory syndrome coronavirus 2
SEPVLKGVKLHYT

SEQ ID NO: 27496 - protein, 15 aa, Severe acute respiratory syndrome-related coronavirus
  REGION 1..15: note = Membrane; OLP_Mem; Table E
  source 1..15: note = Severe acute respiratory syndrome coronavirus 2
LLWPVTLACFVLAAV

SEQ ID NO: 27497 - protein, 15 aa, Severe acute respiratory syndrome-related coronavirus
  REGION 1..15: note = Membrane; OLP_Mem; Table E
  source 1..15: note = Severe acute respiratory syndrome coronavirus 2
VTLACFVLAAVYRIN

SEQ ID NO: 27498 - protein, 12 aa, Severe acute respiratory syndrome-related coronavirus
  REGION 1..12: note = Membrane; OLP_Mem; Table E
  source 1..12: note = Severe acute respiratory syndrome coronavirus 2
CFVLAAVYRINW

SEQ ID NO: 27499 - protein, 15 aa, Severe acute respiratory syndrome-related coronavirus
  REGION 1..15: note = Membrane; OLP_Mem; Table E
  source 1..15: note = Severe acute respiratory syndrome coronavirus 2
MACLVGLMWLSYFIA

SEQ ID NO: 27500 - protein, 15 aa, Severe acute respiratory syndrome-related coronavirus
  REGION 1..15: note = Membrane; OLP_Mem; Table E
  source 1..15: note = Severe acute respiratory syndrome coronavirus 2
VGLMWLSYFIASFRL

SEQ ID NO: 27501 - protein, 15 aa, Severe acute respiratory syndrome-related coronavirus
  REGION 1..15: note = Nucleocapsid; OLP_Nuc; Table E
  source 1..15: note = Severe acute respiratory syndrome coronavirus 2
RRPQGLPNNTASWFT

SEQ ID NO: 27502 - protein, 15 aa, Severe acute respiratory syndrome-related coronavirus
  REGION 1..15: note = Nucleocapsid; OLP_Nuc; Table E
  source 1..15: note = Severe acute respiratory syndrome coronavirus 2
GLPNNTASWFTALTQ

SEQ ID NO: 27503 - protein, 15 aa, Severe acute respiratory syndrome-related coronavirus
  REGION 1..15: note = Nucleocapsid; OLP_Nuc; Table E
  source 1..15: note = Severe acute respiratory syndrome coronavirus 2
NTASWFTALTQHGKE

SEQ ID NO: 27504 - protein, 15 aa, Severe acute respiratory syndrome-related coronavirus
  REGION 1..15: note = Nucleocapsid; OLP_Nuc; Table E
  source 1..15: note = Severe acute respiratory syndrome coronavirus 2
WFTALTQHGKEDLKF

SEQ ID NO: 27505 - protein, 15 aa, Severe acute respiratory syndrome-related coronavirus
  REGION 1..15: note = Nucleocapsid; OLP_Nuc; Table E
  source 1..15: note = Severe acute respiratory syndrome coronavirus 2
LTQHGKEDLKFPRGQ

SEQ ID NO: 27506 - protein, 15 aa, Severe acute respiratory syndrome-related coronavirus
  REGION 1..15: note = Nucleocapsid; OLP_Nuc; Table E
  source 1..15: note = Severe acute respiratory syndrome coronavirus 2
GKEDLKFPRGQGVPI

SEQ ID NO: 27507 - protein, 15 aa, Severe acute respiratory syndrome-related coronavirus
  REGION 1..15: note = Nucleocapsid; OLP_Nuc; Table E
  source 1..15: note = Severe acute respiratory syndrome coronavirus 2
LKFPRGQGVPINTNS

SEQ ID NO: 27508 - protein, 15 aa, Severe acute respiratory syndrome-related coronavirus
  REGION 1..15: note = Nucleocapsid; OLP_Nuc; Table E
  source 1..15: note = Severe acute respiratory syndrome coronavirus 2
RGQGVPINTNSSPDD

SEQ ID NO: 27509 - protein, 15 aa, Severe acute respiratory syndrome-related coronavirus
  REGION 1..15: note = Nucleocapsid; OLP_Nuc; Table E
  source 1..15: note = Severe acute respiratory syndrome coronavirus 2
VPINTNSSPDDQIGY

SEQ ID NO: 27510 - protein, 15 aa, Severe acute respiratory syndrome-related coronavirus
  REGION 1..15: note = Nucleocapsid; OLP_Nuc; Table E
  source 1..15: note = Severe acute respiratory syndrome coronavirus 2
TNSSPDDQIGYYRRA

SEQ ID NO: 27511 - protein, 15 aa, Severe acute respiratory syndrome-related coronavirus
  REGION 1..15: note = Nucleocapsid; OLP_Nuc; Table E
  source 1..15: note = Severe acute respiratory syndrome coronavirus 2
PDDQIGYYRRATRRI

SEQ ID NO: 27512 - protein, 15 aa, Severe acute respiratory syndrome-related coronavirus
  REGION 1..15: note = Nucleocapsid; OLP_Nuc; Table E
  source 1..15: note = Severe acute respiratory syndrome coronavirus 2
KMKDLSPRWYFYYLG

SEQ ID NO: 27513 - protein, 15 aa, Severe acute respiratory syndrome-related coronavirus
  REGION 1..15: note = Nucleocapsid; OLP_Nuc; Table E
  source 1..15: note = Severe acute respiratory syndrome coronavirus 2
LSPRWYFYYLGTGPE

SEQ ID NO: 27514 - protein, 15 aa, Severe acute respiratory syndrome-related coronavirus
  REGION 1..15: note = Nucleocapsid; OLP_Nuc; Table E
  source 1..15: note = Severe acute respiratory syndrome coronavirus 2
GIIWVATEGALNTPK

SEQ ID NO: 27515 - protein, 15 aa, Severe acute respiratory syndrome-related coronavirus
  REGION 1..15: note = Nucleocapsid; OLP_Nuc; Table E
  source 1..15: note = Severe acute respiratory syndrome coronavirus 2
VATEGALNTPKDHIG

SEQ ID NO: 27516 - protein, 15 aa, Severe acute respiratory syndrome-related coronavirus
  REGION 1..15: note = Nucleocapsid; OLP_Nuc; Table E
  source 1..15: note = Severe acute respiratory syndrome coronavirus 2
GALNTPKDHIGTRNP

SEQ ID NO: 27517 - protein, 15 aa, Severe acute respiratory syndrome-related coronavirus
  REGION 1..15: note = Nucleocapsid; OLP_Nuc; Table E
  source 1..15: note = Severe acute respiratory syndrome coronavirus 2
TPKDHIGTRNPANNA

SEQ ID NO: 27518 - protein, 15 aa, Severe acute respiratory syndrome-related coronavirus
  REGION 1..15: note = Nucleocapsid; OLP_Nuc; Table E
  source 1..15: note = Severe acute respiratory syndrome coronavirus 2
HIGTRNPANNAAIVL

SEQ ID NO: 27519 - protein, 15 aa, Severe acute respiratory syndrome-related coronavirus
  REGION 1..15: note = Nucleocapsid; OLP_Nuc; Table E
  source 1..15: note = Severe acute respiratory syndrome coronavirus 2
RNPANNAAIVLQLPQ

SEQ ID NO: 27520 - protein, 15 aa, Severe acute respiratory syndrome-related coronavirus
  REGION 1..15: note = Nucleocapsid; OLP_Nuc; Table E
  source 1..15: note = Severe acute respiratory syndrome coronavirus 2
NNAAIVLQLPQGTTL

SEQ ID NO: 27521 - protein, 15 aa, Severe acute respiratory syndrome-related coronavirus
  REGION 1..15: note = Nucleocapsid; OLP_Nuc; Table E
  source 1..15: note = Severe acute respiratory syndrome coronavirus 2
IVLQLPQGTTLPKGF

SEQ ID NO: 27522 - protein, 14 aa, Severe acute respiratory syndrome-related coronavirus
  REGION 1..14: note = Nucleocapsid; OLP_Nuc; Table E
  source 1..14: note = Severe acute respiratory syndrome coronavirus 2
LPQGTTLPKGFYAE

SEQ ID NO: 27523 - protein, 15 aa, Severe acute respiratory syndrome-related coronavirus
  REGION 1..15: note = Nucleocapsid; OLP_Nuc; Table E
  source 1..15: note = Severe acute respiratory syndrome coronavirus 2
TSPARMAGNGGDAAL

SEQ ID NO: 27524 - protein, 15 aa, Severe acute respiratory syndrome-related coronavirus
  REGION 1..15: note = Nucleocapsid; OLP_Nuc; Table E
  source 1..15: note = Severe acute respiratory syndrome coronavirus 2
RMAGNGGDAALALLL

SEQ ID NO: 27525 - protein, 15 aa, Severe acute respiratory syndrome-related coronavirus
  REGION 1..15: note = Nucleocapsid; OLP_Nuc; Table E
  source 1..15: note = Severe acute respiratory syndrome coronavirus 2
NGGDAALALLLLDRL

SEQ ID NO: 27526 - protein, 15 aa, Severe acute respiratory syndrome-related coronavirus
  REGION 1..15: note = Nucleocapsid; OLP_Nuc; Table E
  source 1..15: note = Severe acute respiratory syndrome coronavirus 2
AALALLLLDRLNQLE

SEQ ID NO: 27527 - protein, 15 aa, Severe acute respiratory syndrome-related coronavirus
  REGION 1..15: note = Nucleocapsid; OLP_Nuc; Table E
  source 1..15: note = Severe acute respiratory syndrome coronavirus 2
LLLLDRLNQLESKMS

SEQ ID NO: 27528 - protein, 15 aa, Severe acute respiratory syndrome-related coronavirus
  REGION 1..15: note = Nucleocapsid; OLP_Nuc; Table E
  source 1..15: note = Severe acute respiratory syndrome coronavirus 2
DRLNQLESKMSGKGQ

SEQ ID NO: 27529 - protein, 15 aa, Severe acute respiratory syndrome-related coronavirus
  REGION 1..15: note = Nucleocapsid; OLP_Nuc; Table E
  source 1..15: note = Severe acute respiratory syndrome coronavirus 2
KMSGKGQQQQGQTVT

SEQ ID NO: 27530 - protein, 15 aa, Severe acute respiratory syndrome-related coronavirus
  REGION 1..15: note = Nucleocapsid; OLP_Nuc; Table E
  source 1..15: note = Severe acute respiratory syndrome coronavirus 2
KGQQQQGQTVTKKSA

SEQ ID NO: 27531 - protein, 15 aa, Severe acute respiratory syndrome-related coronavirus
  REGION 1..15: note = Nucleocapsid; OLP_Nuc; Table E
  source 1..15: note = Severe acute respiratory syndrome coronavirus 2
QQGQTVTKKSAAEAS

SEQ ID NO: 27532 - protein, 15 aa, Severe acute respiratory syndrome-related coronavirus
  REGION 1..15: note = Nucleocapsid; OLP_Nuc; Table E
  source 1..15: note = Severe acute respiratory syndrome coronavirus 2
TVTKKSAAEASKKPR

SEQ ID NO: 27533 - protein, 15 aa, Severe acute respiratory syndrome-related coronavirus
  REGION 1..15: note = Nucleocapsid; OLP_Nuc; Table E
  source 1..15: note = Severe acute respiratory syndrome coronavirus 2
KSAAEASKKPRQKRT

SEQ ID NO: 27534 - protein, 15 aa, Severe acute respiratory syndrome-related coronavirus
  REGION 1..15: note = Nucleocapsid; OLP_Nuc; Table E
  source 1..15: note = Severe acute respiratory syndrome coronavirus 2
EASKKPRQKRTATKA

SEQ ID NO: 27535 - protein, 15 aa, Severe acute respiratory syndrome-related coronavirus
  REGION 1..15: note = Nucleocapsid; OLP_Nuc; Table E
  source 1..15: note = Severe acute respiratory syndrome coronavirus 2
KPRQKRTATKAYNVT

SEQ ID NO: 27536 - protein, 15 aa, Severe acute respiratory syndrome-related coronavirus
  REGION 1..15: note = Nucleocapsid; OLP_Nuc; Table E
  source 1..15: note = Severe acute respiratory syndrome coronavirus 2
KRTATKAYNVTQAFG

SEQ ID NO: 27537 - protein, 15 aa, Severe acute respiratory syndrome-related coronavirus
  REGION 1..15: note = Nucleocapsid; OLP_Nuc; Table E
  source 1..15: note = Severe acute respiratory syndrome coronavirus 2
TKAYNVTQAFGRRGP

SEQ ID NO: 27538 - protein, 14 aa, Severe acute respiratory syndrome-related coronavirus
  REGION 1..14: note = Nucleocapsid; OLP_Nuc; Table E
  source 1..14: note = Severe acute respiratory syndrome coronavirus 2
NVTQAFGRRGPEQT

SEQ ID NO: 27539 - protein, 15 aa, Severe acute respiratory syndrome-related coronavirus
  REGION 1..15: note = Nucleocapsid; OLP_Nuc; Table E
  source 1..15: note = Severe acute respiratory syndrome coronavirus 2
GNFGDQELIRQGTDY

SEQ ID NO: 27540 - protein, 15 aa, Severe acute respiratory syndrome-related coronavirus
  REGION 1..15: note = Nucleocapsid; OLP_Nuc; Table E
  source 1..15: note = Severe acute respiratory syndrome coronavirus 2
DQELIRQGTDYKHWP

SEQ ID NO: 27541 - protein, 15 aa, Severe acute respiratory syndrome-related coronavirus
  REGION 1..15: note = Nucleocapsid; OLP_Nuc; Table E
  source 1..15: note = Severe acute respiratory syndrome coronavirus 2
IRQGTDYKHWPQIAQ

SEQ ID NO: 27542 - protein, 15 aa, Severe acute respiratory syndrome-related coronavirus
  REGION 1..15: note = Nucleocapsid; OLP_Nuc; Table E
  source 1..15: note = Severe acute respiratory syndrome coronavirus 2
TDYKHWPQIAQFAPS

SEQ ID NO: 27543 - protein, 15 aa, Severe acute respiratory syndrome-related coronavirus
  REGION 1..15: note = Nucleocapsid; OLP_Nuc; Table E
  source 1..15: note = Severe acute respiratory syndrome coronavirus 2
HWPQIAQFAPSASAF

SEQ ID NO: 27544 - protein, 15 aa, Severe acute respiratory syndrome-related coronavirus
  REGION 1..15: note = Nucleocapsid; OLP_Nuc; Table E
  source 1..15: note = Severe acute respiratory syndrome coronavirus 2
IAQFAPSASAFFGMS

SEQ ID NO: 27545 - protein, 15 aa, Severe acute respiratory syndrome-related coronavirus
  REGION 1..15: note = Nucleocapsid; OLP_Nuc; Table E
  source 1..15: note = Severe acute respiratory syndrome coronavirus 2
APSASAFFGMSRIGM

SEQ ID NO: 27546 - protein, 15 aa, Severe acute respiratory syndrome-related coronavirus
  REGION 1..15: note = Nucleocapsid; OLP_Nuc; Table E
  source 1..15: note = Severe acute respiratory syndrome coronavirus 2
SAFFGMSRIGMEVTP

SEQ ID NO: 27547 - protein, 15 aa, Severe acute respiratory syndrome-related coronavirus
  REGION 1..15: note = Nucleocapsid; OLP_Nuc; Table E
  source 1..15: note = Severe acute respiratory syndrome coronavirus 2
GMSRIGMEVTPSGTW

SEQ ID NO: 27548 - protein, 15 aa, Severe acute respiratory syndrome-related coronavirus
  REGION 1..15: note = Nucleocapsid; OLP_Nuc; Table E
  source 1..15: note = Severe acute respiratory syndrome coronavirus 2
IGMEVTPSGTWLTYT

SEQ ID NO: 27549 - protein, 15 aa, Severe acute respiratory syndrome-related coronavirus
  REGION 1..15: note = Nucleocapsid; OLP_Nuc; Table E
  source 1..15: note = Severe acute respiratory syndrome coronavirus 2
VTPSGTWLTYTGAIK

SEQ ID NO: 27550 - protein, 15 aa, Severe acute respiratory syndrome-related coronavirus
  REGION 1..15: note = Nucleocapsid; OLP_Nuc; Table E
  source 1..15: note = Severe acute respiratory syndrome coronavirus 2
FKDQVILLNKHIDAY

SEQ ID NO: 27551 - protein, 15 aa, Severe acute respiratory syndrome-related coronavirus
  REGION 1..15: note = Nucleocapsid; OLP_Nuc; Table E
  source 1..15: note = Severe acute respiratory syndrome coronavirus 2
VILLNKHIDAYKTFP

SEQ ID NO: 27552 - protein, 15 aa, Severe acute respiratory syndrome-related coronavirus
  REGION 1..15: note = Nucleocapsid; OLP_Nuc; Table E
  source 1..15: note = Severe acute respiratory syndrome coronavirus 2
NKHIDAYKTFPPTEP

SEQ ID NO: 27553 - protein, 15 aa, Severe acute respiratory syndrome-related coronavirus
  REGION 1..15: note = Nucleocapsid; OLP_Nuc; Table E
  source 1..15: note = Severe acute respiratory syndrome coronavirus 2
DAYKTFPPTEPKKDK

SEQ ID NO: 27554 - protein, 14 aa, Severe acute respiratory syndrome-related coronavirus
  REGION 1..14: note = Nucleocapsid; OLP_Nuc; Table E
  source 1..14: note = Severe acute respiratory syndrome coronavirus 2
TFPPTEPKKDKKKK

SEQ ID NO: 27555 - protein, 15 aa, Severe acute respiratory syndrome-related coronavirus
  REGION 1..15: note = Nucleocapsid; OLP_Nuc; Table E
  source 1..15: note = Severe acute respiratory syndrome coronavirus 2
KKDKKKKADETQALP

SEQ ID NO: 27556 - protein, 15 aa, Severe acute respiratory syndrome-related coronavirus
  REGION 1..15: note = Nucleocapsid; OLP_Nuc; Table E
  source 1..15: note = Severe acute respiratory syndrome coronavirus 2
KKKADETQALPQRQK

SEQ ID NO: 27557 - protein, 15 aa, Severe acute respiratory syndrome-related coronavirus
  REGION 1..15: note = Nucleocapsid; OLP_Nuc; Table E
  source 1..15: note = Severe acute respiratory syndrome coronavirus 2
DETQALPQRQKKQQT

SEQ ID NO: 27558 - protein, 15 aa, Severe acute respiratory syndrome-related coronavirus
  REGION 1..15: note = Nucleocapsid; OLP_Nuc; Table E
  source 1..15: note = Severe acute respiratory syndrome coronavirus 2
ALPQRQKKQQTVTLL

SEQ ID NO: 27559 - protein, 15 aa, Severe acute respiratory syndrome-related coronavirus
  REGION 1..15: note = Nucleocapsid; OLP_Nuc; Table E
  source 1..15: note = Severe acute respiratory syndrome coronavirus 2
RQKKQQTVTLLPAAD

SEQ ID NO: 27560 - protein, 15 aa, Severe acute respiratory syndrome-related coronavirus
  REGION 1..15: note = Nucleocapsid; OLP_Nuc; Table E
  source 1..15: note = Severe acute respiratory syndrome coronavirus 2
QQTVTLLPAADLDDF

SEQ ID NO: 27561 - protein, 15 aa, Severe acute respiratory syndrome-related coronavirus
  REGION 1..15: note = Nucleocapsid; OLP_Nuc; Table E
  source 1..15: note = Severe acute respiratory syndrome coronavirus 2
TLLPAADLDDFSKQL

SEQ ID NO: 27562 - protein, 12 aa, Severe acute respiratory syndrome-related coronavirus
  REGION 1..12: note = Nucleocapsid; OLP_Nuc; Table E
  source 1..12: note = Severe acute respiratory syndrome coronavirus 2
AADLDDFSKQLQ

SEQ ID NO: 27563 - protein, 15 aa, Severe acute respiratory syndrome-related coronavirus
  REGION 1..15: note = ORF3a; OLP_ORF3a; Table E
  source 1..15: note = Severe acute respiratory syndrome coronavirus 2
VTLKQGEIKDATPSD

SEQ ID NO: 27564 - protein, 15 aa, Severe acute respiratory syndrome-related coronavirus
  REGION 1..15: note = ORF3a; OLP_ORF3a; Table E
  source 1..15: note = Severe acute respiratory syndrome coronavirus 2
QGEIKDATPSDFVRA

SEQ ID NO: 27565 - protein, 15 aa, Severe acute respiratory syndrome-related coronavirus
  REGION 1..15: note = ORF3a; OLP_ORF3a; Table E
  source 1..15: note = Severe acute respiratory syndrome coronavirus 2
KDATPSDFVRATATI

SEQ ID NO: 27566 - protein, 15 aa, Severe acute respiratory syndrome-related coronavirus
  REGION 1..15: note = ORF3a; OLP_ORF3a; Table E
  source 1..15: note = Severe acute respiratory syndrome coronavirus 2
PSDFVRATATIPIQA

SEQ ID NO: 27567 - protein, 15 aa, Severe acute respiratory syndrome-related coronavirus
  REGION 1..15: note = ORF3a; OLP_ORF3a; Table E
  source 1..15: note = Severe acute respiratory syndrome coronavirus 2
VRATATIPIQASLPF

SEQ ID NO: 27568 - protein, 15 aa, Severe acute respiratory syndrome-related coronavirus
  REGION 1..15: note = ORF3a; OLP_ORF3a; Table E
  source 1..15: note = Severe acute respiratory syndrome coronavirus 2
ATIPIQASLPFGWLI

SEQ ID NO: 27569 - protein, 15 aa, Severe acute respiratory syndrome-related coronavirus
  REGION 1..15: note = ORF3a; OLP_ORF3a; Table E
  source 1..15: note = Severe acute respiratory syndrome coronavirus 2
IQASLPFGWLIVGVA

SEQ ID NO: 27570 - protein, 15 aa, Severe acute respiratory syndrome-related coronavirus
  REGION 1..15: note = ORF3a; OLP_ORF3a; Table E
  source 1..15: note = Severe acute respiratory syndrome coronavirus 2
LPFGWLIVGVALLAV

SEQ ID NO: 27571 - protein, 15 aa, Severe acute respiratory syndrome-related coronavirus
  REGION 1..15: note = ORF3a; OLP_ORF3a; Table E
  source 1..15: note = Severe acute respiratory syndrome coronavirus 2
LAVFQSASKIITLKK

SEQ ID NO: 27572 - protein, 15 aa, Severe acute respiratory syndrome-related coronavirus
  REGION 1..15: note = ORF3a; OLP_ORF3a; Table E
  source 1..15: note = Severe acute respiratory syndrome coronavirus 2
QSASKIITLKKRWQL

SEQ ID NO: 27573 - protein, 15 aa, Severe acute respiratory syndrome-related coronavirus
  REGION 1..15: note = ORF3a; OLP_ORF3a; Table E
  source 1..15: note = Severe acute respiratory syndrome coronavirus 2
KIITLKKRWQLALSK

SEQ ID NO: 27574 - protein, 15 aa, Severe acute respiratory syndrome-related coronavirus
  REGION 1..15: note = ORF3a; OLP_ORF3a; Table E
  source 1..15: note = Severe acute respiratory syndrome coronavirus 2
LKKRWQLALSKGVHF

SEQ ID NO: 27575 - protein, 15 aa, Severe acute respiratory syndrome-related coronavirus
  REGION 1..15: note = ORF3a; OLP_ORF3a; Table E
  source 1..15: note = Severe acute respiratory syndrome coronavirus 2
WQLALSKGVHFVCNL

SEQ ID NO: 27576 - protein, 13 aa, Severe acute respiratory syndrome-related coronavirus
  REGION 1..13: note = ORF3a; OLP_ORF3a; Table E
  source 1..13: note = Severe acute respiratory syndrome coronavirus 2
LSKGVHFVCNLLL

SEQ ID NO: 27577 - protein, 15 aa, Severe acute respiratory syndrome-related coronavirus
  REGION 1..15: note = ORF3a; OLP_ORF3a; Table E
  source 1..15: note = Severe acute respiratory syndrome coronavirus 2
EAPFLYLYALVYFLQ

SEQ ID NO: 27578 - protein, 15 aa, Severe acute respiratory syndrome-related coronavirus
  REGION 1..15: note = ORF3a; OLP_ORF3a; Table E
  source 1..15: note = Severe acute respiratory syndrome coronavirus 2
LYLYALVYFLQSINF

SEQ ID NO: 27579 - protein, 15 aa, Severe acute respiratory syndrome-related coronavirus
  REGION 1..15: note = ORF3a; OLP_ORF3a; Table E
  source 1..15: note = Severe acute respiratory syndrome coronavirus 2
ALVYFLQSINFVRII

SEQ ID NO: 27580 - protein, 15 aa, Severe acute respiratory syndrome-related coronavirus
  REGION 1..15: note = ORF3a; OLP_ORF3a; Table E
  source 1..15: note = Severe acute respiratory syndrome coronavirus 2
FLQSINFVRIIMRLW

SEQ ID NO: 27581 - protein, 15 aa, Severe acute respiratory syndrome-related coronavirus
  REGION 1..15: note = ORF3a; OLP_ORF3a; Table E
  source 1..15: note = Severe acute respiratory syndrome coronavirus 2
INFVRIIMRLWLCWK

SEQ ID NO: 27582 - protein, 15 aa, Severe acute respiratory syndrome-related coronavirus
  REGION 1..15: note = ORF3a; OLP_ORF3a; Table E
  source 1..15: note = Severe acute respiratory syndrome coronavirus 2
RIIMRLWLCWKCRSK

SEQ ID NO: 27583 - protein, 15 aa, Severe acute respiratory syndrome-related coronavirus
  REGION 1..15: note = ORF3a; OLP_ORF3a; Table E
  source 1..15: note = Severe acute respiratory syndrome coronavirus 2
RLWLCWKCRSKNPLL

SEQ ID NO: 27584 - protein, 15 aa, Severe acute respiratory syndrome-related coronavirus
  REGION 1..15: note = ORF3a; OLP_ORF3a; Table E
  source 1..15: note = Severe acute respiratory syndrome coronavirus 2
CWKCRSKNPLLYDAN

SEQ ID NO: 27585 - protein, 15 aa, Severe acute respiratory syndrome-related coronavirus
  REGION 1..15: note = ORF3a; OLP_ORF3a; Table E
  source 1..15: note = Severe acute respiratory syndrome coronavirus 2
RSKNPLLYDANYFLC

SEQ ID NO: 27586 - protein, 15 aa, Severe acute respiratory syndrome-related coronavirus
  REGION 1..15: note = ORF3a; OLP_ORF3a; Table E
  source 1..15: note = Severe acute respiratory syndrome coronavirus 2
PLLYDANYFLCWHTN

SEQ ID NO: 27587 - protein, 15 aa, Severe acute respiratory syndrome-related coronavirus
  REGION 1..15: note = ORF3a; OLP_ORF3a; Table E
  source 1..15: note = Severe acute respiratory syndrome coronavirus 2
ITSGDGTTSPISEHD

SEQ ID NO: 27588 - protein, 15 aa, Severe acute respiratory syndrome-related coronavirus
  REGION 1..15: note = ORF3a; OLP_ORF3a; Table E
  source 1..15: note = Severe acute respiratory syndrome coronavirus 2
DGTTSPISEHDYQIG

SEQ ID NO: 27589 - protein, 15 aa, Severe acute respiratory syndrome-related coronavirus
  REGION 1..15: note = ORF3a; OLP_ORF3a; Table E
  source 1..15: note = Severe acute respiratory syndrome coronavirus 2
SPISEHDYQIGGYTE

SEQ ID NO: 27590 - protein, 15 aa, Severe acute respiratory syndrome-related coronavirus
  REGION 1..15: note = ORF3a; OLP_ORF3a; Table E
  source 1..15: note = Severe acute respiratory syndrome coronavirus 2
EHDYQIGGYTEKWES

SEQ ID NO: 27591 - protein, 14 aa, Severe acute respiratory syndrome-related coronavirus
  REGION 1..14: note = ORF3a; OLP_ORF3a; Table E
  source 1..14: note = Severe acute respiratory syndrome coronavirus 2
QIGGYTEKWESGVK

SEQ ID NO: 27592 - protein, 15 aa, Severe acute respiratory syndrome-related coronavirus
  REGION 1..15: note = ORF3a; OLP_ORF3a; Table E
  source 1..15: note = Severe acute respiratory syndrome coronavirus 2
DCVVLHSYFTSDYYQ

SEQ ID NO: 27593 - protein, 15 aa, Severe acute respiratory syndrome-related coronavirus
  REGION 1..15: note = ORF3a; OLP_ORF3a; Table E
  source 1..15: note = Severe acute respiratory syndrome coronavirus 2
LHSYFTSDYYQLYST

SEQ ID NO: 27594 - protein, 15 aa, Severe acute respiratory syndrome-related coronavirus
  REGION 1..15: note = ORF3a; OLP_ORF3a; Table E
  source 1..15: note = Severe acute respiratory syndrome coronavirus 2
FTSDYYQLYSTQLST

SEQ ID NO: 27595 - protein, 15 aa, Severe acute respiratory syndrome-related coronavirus
  REGION 1..15: note = ORF3a; OLP_ORF3a; Table E
  source 1..15: note = Severe acute respiratory syndrome coronavirus 2
YYQLYSTQLSTDTGV

SEQ ID NO: 27596 - protein, 15 aa, Severe acute respiratory syndrome-related coronavirus
  REGION 1..15: note = ORF3a; OLP_ORF3a; Table E
  source 1..15: note = Severe acute respiratory syndrome coronavirus 2
YSTQLSTDTGVEHVT

SEQ ID NO: 27597 - protein, 15 aa, Severe acute respiratory syndrome-related coronavirus
  REGION 1..15: note = ORF3a; OLP_ORF3a; Table E
  source 1..15: note = Severe acute respiratory syndrome coronavirus 2
LSTDTGVEHVTFFIY

SEQ ID NO: 27598 - protein, 15 aa, Severe acute respiratory syndrome-related coronavirus
  REGION 1..15: note = ORF3a; OLP_ORF3a; Table E
  source 1..15: note = Severe acute respiratory syndrome coronavirus 2
TGVEHVTFFIYNKIV

SEQ ID NO: 27599 - protein, 15 aa, Severe acute respiratory syndrome-related coronavirus
  REGION 1..15: note = ORF3a; OLP_ORF3a; Table E
  source 1..15: note = Severe acute respiratory syndrome coronavirus 2
HVTFFIYNKIVDEPE

SEQ ID NO: 27600 - protein, 15 aa, Severe acute respiratory syndrome-related coronavirus
  REGION 1..15: note = ORF3a; OLP_ORF3a; Table E
  source 1..15: note = Severe acute respiratory syndrome coronavirus 2
FIYNKIVDEPEEHVQ

SEQ ID NO: 27601 - protein, 15 aa, Severe acute respiratory syndrome-related coronavirus
  REGION 1..15: note = ORF3a; OLP_ORF3a; Table E
  source 1..15: note = Severe acute respiratory syndrome coronavirus 2
KIVDEPEEHVQIHTI

SEQ ID NO: 27602 - protein, 15 aa, Severe acute respiratory syndrome-related coronavirus
  REGION 1..15: note = ORF3a; OLP_ORF3a; Table E
  source 1..15: note = Severe acute respiratory syndrome coronavirus 2
EPEEHVQIHTIDGSS

SEQ ID NO: 27603 - protein, 12 aa, Severe acute respiratory syndrome-related coronavirus
  REGION 1..12: note = ORF3a; OLP_ORF3a; Table E
  source 1..12: note = Severe acute respiratory syndrome coronavirus 2
HVQIHTIDGSSG

SEQ ID NO: 27604 - protein, 9 aa, Severe acute respiratory syndrome-related coronavirus
  REGION 1..9: note = ORF3a 52-85; Min_validated; Table F
  source 1..9: note = Severe acute respiratory syndrome coronavirus 2
ALSKGVHFV

SEQ ID NO: 27605 - protein, 9 aa, Severe acute respiratory syndrome-related coronavirus
  REGION 1..9: note = N 204-239; Min_validated; Table F
  source 1..9: note = Severe acute respiratory syndrome coronavirus 2
LLLDRLNQL

SEQ ID NO: 27606 - protein, 9 aa, Severe acute respiratory syndrome-related coronavirus
  REGION 1..9: note = ORF3a 52-85; Min_validated; Table F
  source 1..9: note = Severe acute respiratory syndrome coronavirus 2
SASKIITLK

SEQ ID NO: 27607 - protein, 9 aa, Severe acute respiratory syndrome-related coronavirus
  REGION 1..9: note = N 345-375; Min_validated; Table F
  source 1..9: note = Severe acute respiratory syndrome coronavirus 2
KTFPPTEPK

SEQ ID NO: 27608 - protein, 10 aa, Severe acute respiratory syndrome-related coronavirus
  REGION 1..10: note = N 283-338; Min_validated; Table F
  source 1..10: note = Severe acute respiratory syndrome coronavirus 2
AQFAPSASAF

SEQ ID NO: 27609 - protein, 9 aa, Severe acute respiratory syndrome-related coronavirus
  REGION 1..9: note = ORF3a 198-254; Min_validated; Table F
  source 1..9: note = Severe acute respiratory syndrome coronavirus 2
YYQLYSTQL

SEQ ID NO: 27610 - protein, 10 aa, Severe acute respiratory syndrome-related coronavirus
  REGION 1..10: note = N 128-174; Min_validated; Table F
  source 1..10: note = Severe acute respiratory syndrome coronavirus 2
ATEGALNTPK

SEQ ID NO: 27611 - protein, 9 aa, Severe acute respiratory syndrome-related coronavirus
  REGION 1..9: note = ORF3a 101-152; Min_validated; Table F
  source 1..9: note = Severe acute respiratory syndrome coronavirus 2
VYFLQSINF

SEQ ID NO: 27612 - protein, 9 aa, Severe acute respiratory syndrome-related coronavirus
  REGION 1..9: note = N 283-338; Min_validated; Table F
  source 1..9: note = Severe acute respiratory syndrome coronavirus 2
GMSRIGMEV

SEQ ID NO: 27613 - protein, 10 aa, Severe acute respiratory syndrome-related coronavirus
  REGION 1..10: note = N 345-375; Min_validated; Table F
  source 1..10: note = Severe acute respiratory syndrome coronavirus 2
KTFPPTEPKK

SEQ ID NO: 27614 - protein, 9 aa, Severe acute respiratory syndrome-related coronavirus
  REGION 1..9: note = ORF3a 198-254; Min_validated; Table F
  source 1..9: note = Severe acute respiratory syndrome coronavirus 2
FTSDYYQLY

SEQ ID NO: 27615 - protein, 9 aa, Severe acute respiratory syndrome-related coronavirus
  REGION 1..9: note = N 283-338; Min_validated; Table F
  source 1..9: note = Severe acute respiratory syndrome coronavirus 2
ASAFFGMSR

SEQ ID NO: 27616 - protein, 9 aa, Severe acute respiratory syndrome-related coronavirus
  REGION 1..9: note = N 99-118; Min_validated; Table F
  source 1..9: note = Severe acute respiratory syndrome coronavirus 2
SPRWYFYYL

SEQ ID NO: 27617 - protein, 9 aa, Severe acute respiratory syndrome-related coronavirus
  REGION 1..9: note = ORF3a 101-152; Min_validated; Table F
  source 1..9: note = Severe acute respiratory syndrome coronavirus 2
YLYALVYFL

SEQ ID NO: 27618 - protein, 9 aa, Severe acute respiratory syndrome-related coronavirus
  REGION 1..9: note = N 283-338; Min_validated; Table F
  source 1..9: note = Severe acute respiratory syndrome coronavirus 2
MEVTPSGTW

SEQ ID NO: 27619 - protein, 9 aa, Severe acute respiratory syndrome-related coronavirus
  REGION 1..9: note = ORF3a 101-152; Min_validated; Table F
  source 1..9: note = Severe acute respiratory syndrome coronavirus 2
LLYDANYFL

SEQ ID NO: 27620 - protein, 10 aa, Severe acute respiratory syndrome-related coronavirus
  REGION 1..10: note = N 204-239; Min_validated; Table F
  source 1..10: note = Severe acute respiratory syndrome coronavirus 2
LLLLDRLNQL

SEQ ID NO: 27621 - protein, 10 aa, Severe acute respiratory syndrome-related coronavirus
  REGION 1..10: note = N 128-174; Min_validated; Table F
  source 1..10: note = Severe acute respiratory syndrome coronavirus 2
NPANNAAIVL

SEQ ID NO: 27622 - protein, 9 aa, Severe acute respiratory syndrome-related coronavirus
  REGION 1..9: note = N 128-174; Min_validated; Table F
  source 1..9: note = Severe acute respiratory syndrome coronavirus 2
LQLPQGTTL

SEQ ID NO: 27623 - protein, 9 aa, Severe acute respiratory syndrome-related coronavirus
  REGION 1..9: note = N 39-94; Min_validated; Table F
  source 1..9: note = Severe acute respiratory syndrome coronavirus 2
FPRGQGVPI

SEQ ID NO: 27624 - protein, 10 aa, Severe acute respiratory syndrome-related coronavirus
  REGION 1..10: note = N 283-338; Min_validated; Table F
  source 1..10: note = Severe acute respiratory syndrome coronavirus 2
MEVTPSGTWL

SEQ ID NO: 27625 - protein, 9 aa, Severe acute respiratory syndrome-related coronavirus
  REGION 1..9: note = N 204-239; Min_validated; Table F
  source 1..9: note = Severe acute respiratory syndrome coronavirus 2
LALLLLDRL

SEQ ID NO: 27626 - protein, 9 aa, Severe acute respiratory syndrome-related coronavirus
  REGION 1..9: note = N 232-282; Min_validated; Table F
  source 1..9: note = Severe acute respiratory syndrome coronavirus 2
KPRQKRTAT

SEQ ID NO: 27627 - protein, 9 aa, Severe acute respiratory syndrome-related coronavirus
  REGION 1..9: note = N 128-174; Min_validated; Table F
  source 1..9: note = Severe acute respiratory syndrome coronavirus 2
ALNTPKDHI

SEQ ID NO: 27628 - protein, 11 aa, Severe acute respiratory syndrome-related coronavirus
  REGION 1..11: note = N 283-338; Min_validated; Table F
  source 1..11: note = Severe acute respiratory syndrome coronavirus 2
DYKHWPQIAQF

SEQ ID NO: 27629 - protein, 9 aa, Severe acute respiratory syndrome-related coronavirus
  REGION 1..9: note = M 83-102; Min_validated; Table F
  source 1..9: note = Severe acute respiratory syndrome coronavirus 2
GLMWLSYFI

SEQ ID NO: 27630 - protein, 10 aa, Severe acute respiratory syndrome-related coronavirus
  REGION 1..10: note = M 55-75; Min_validated; Table F
  source 1..10: note = Severe acute respiratory syndrome coronavirus 2
TLACFVLAAV

SEQ ID NO: 27631 - protein, 9 aa, Severe acute respiratory syndrome-related coronavirus
  REGION 1..9: note = N 232-282; Min_EDGE_Nuc; Table F
  source 1..9: note = Severe acute respiratory syndrome coronavirus 2
KAYNVTQAF

SEQ ID NO: 27632 - protein, 9 aa, Severe acute respiratory syndrome-related coronavirus
  REGION 1..9: note = N 232-282; Min_EDGE_Nuc; Table F
  source 1..9: note = Severe acute respiratory syndrome coronavirus 2
GQQQQGQTV

SEQ ID NO: 27633 - protein, 9 aa, Severe acute respiratory syndrome-related coronavirus
  REGION 1..9: note = N 368-408; Min_EDGE_Nuc; Table F
  source 1..9: note = Severe acute respiratory syndrome coronavirus 2
LPAADLDDF

SEQ ID NO: 27634 - protein, 9 aa, Severe acute respiratory syndrome-related coronavirus
  REGION 1..9: note = N 283-338; Min_EDGE_Nuc; Table F
  source 1..9: note = Severe acute respiratory syndrome coronavirus 2
ELIRQGTDY

SEQ ID NO: 27635 - protein, 9 aa, Severe acute respiratory syndrome-related coronavirus
  REGION 1..9: note = N 283-338; Min_EDGE_Nuc; Table F
  source 1..9: note = Severe acute respiratory syndrome coronavirus 2
QFAPSASAF

SEQ ID NO: 27636 - protein, 11 aa, Severe acute respiratory syndrome-related coronavirus
  REGION 1..11: note = N 232-282; Min_EDGE_Nuc; Table F
  source 1..11: note = Severe acute respiratory syndrome coronavirus 2
GQQQQGQTVTK

SEQ ID NO: 27637 - protein, 9 aa, Severe acute respiratory syndrome-related coronavirus
  REGION 1..9: note = N 283-338; Min_EDGE_Nuc; Table F
  source 1..9: note = Severe acute respiratory syndrome coronavirus 2
TPSGTWLTY

SEQ ID NO: 27638 - protein, 9 aa, Severe acute respiratory syndrome-related coronavirus
  REGION 1..9: note = N 283-338; Min_EDGE_Nuc; Table F
  source 1..9: note = Severe acute respiratory syndrome coronavirus 2
KHWPQIAQF

SEQ ID NO: 27639 - protein, 8 aa, Severe acute respiratory syndrome-related coronavirus
  REGION 1..8: note = N 232-282; Min_EDGE_Nuc; Table F
  source 1..8: note = Severe acute respiratory syndrome coronavirus 2
AYNVTQAF

SEQ ID NO: 27640 - protein, 10 aa, Severe acute respiratory syndrome-related coronavirus
  REGION 1..10: note = N 368-408; Min_EDGE_Nuc; Table F
  source 1..10: note = Severe acute respiratory syndrome coronavirus 2
ETQALPQRQK

SEQ ID NO: 27641 - protein, 11 aa, Severe acute respiratory syndrome-related coronavirus
  REGION 1..11: note = N 232-282; Min_EDGE_Nuc; Table F
  source 1..11: note = Severe acute respiratory syndrome coronavirus 2
KAYNVTQAFGR

SEQ ID NO: 27642 - protein, 9 aa, Severe acute respiratory syndrome-related coronavirus
  REGION 1..9: note = N 128-174; Min_EDGE_Nuc; Table F
  source 1..9: note = Severe acute respiratory syndrome coronavirus 2
TPKDHIGTR

SEQ ID NO: 27643 - protein, 9 aa, Severe acute respiratory syndrome-related coronavirus
  REGION 1..9: note = N 39-94; Min_EDGE_Nuc; Table F
  source 1..9: note = Severe acute respiratory syndrome coronavirus 2
QHGKEDLKF

SEQ ID NO: 27644 - protein, 10 aa, Severe acute respiratory syndrome-related coronavirus
  REGION 1..10: note = N 39-94; Min_EDGE_Nuc; Table F
  source 1..10: note = Severe acute respiratory syndrome coronavirus 2
TQHGKEDLKF

SEQ ID NO: 27645 - protein, 9 aa, Severe acute respiratory syndrome-related coronavirus
  REGION 1..9: note = N 232-282; Min_EDGE_Nuc; Table F
  source 1..9: note = Severe acute respiratory syndrome coronavirus 2
NVTQAFGRR

SEQ ID NO: 27646 - protein, 11 aa, Severe acute respiratory syndrome-related coronavirus
  REGION 1..11: note = N 283-338; Min_EDGE_Nuc; Table F
  source 1..11: note = Severe acute respiratory syndrome coronavirus 2
AQFAPSASAFF

SEQ ID NO: 27647 - protein, 9 aa, Severe acute respiratory syndrome-related coronavirus
  REGION 1..9: note = N 204-239; Min_EDGE_Nuc; Table F
  source 1..9: note = Severe acute respiratory syndrome coronavirus 2
RLNQLESKM

SEQ ID NO: 27648 - protein, 9 aa, Severe acute respiratory syndrome-related coronavirus
  REGION 1..9: note = N 39-94; Min_EDGE_Nuc; Table F
  source 1..9: note = Severe acute respiratory syndrome coronavirus 2
SPDDQIGYY

SEQ ID NO: 27649 - protein, 8 aa, Severe acute respiratory syndrome-related coronavirus
  REGION 1..8: note = N 283-338; Min_EDGE_Nuc; Table F
  source 1..8: note = Severe acute respiratory syndrome coronavirus 2
EVTPSGTW

SEQ ID NO: 27650 - protein, 10 aa, Severe acute respiratory syndrome-related coronavirus
  REGION 1..10: note = N 232-282; Min_EDGE_Nuc; Table F
  source 1..10: note = Severe acute respiratory syndrome coronavirus 2
TKAYNVTQAF

SEQ ID NO: 27651 - protein, 8 aa, Severe acute respiratory syndrome-related coronavirus
  REGION 1..8: note = N 204-239; Min_EDGE_Nuc; Table F
  source 1..8: note = Severe acute respiratory syndrome coronavirus 2
DAALALLL

SEQ ID NO: 27652 - protein, 10 aa, Severe acute respiratory syndrome-related coronavirus
  REGION 1..10: note = N 283-338; Min_EDGE_Nuc; Table F
  source 1..10: note = Severe acute respiratory syndrome coronavirus 2
QFAPSASAFF

SEQ ID NO: 27653 - protein, 9 aa, Severe acute respiratory syndrome-related coronavirus
  REGION 1..9: note = N 345-375; Min_EDGE_Nuc; Table F
  source 1..9: note = Severe acute respiratory syndrome coronavirus 2
LLNKHIDAY

SEQ ID NO: 27654 - protein, 9 aa, Severe acute respiratory syndrome-related coronavirus
  REGION 1..9: note = N 232-282; Min_EDGE_Nuc; Table F
  source 1..9: note = Severe acute respiratory syndrome coronavirus 2
QQQGQTVTK

SEQ ID NO: 27655 - protein, 8 aa, Severe acute respiratory syndrome-related coronavirus
  REGION 1..8: note = N 283-338; Min_EDGE_Nuc; Table F
  source 1..8: note = Severe acute respiratory syndrome coronavirus 2
SAFFGMSR

SEQ ID NO: 27656 - protein, 11 aa, Severe acute respiratory syndrome-related coronavirus
  REGION 1..11: note = N 204-239; Min_EDGE_Nuc; Table F
  source 1..11: note = Severe acute respiratory syndrome coronavirus 2
ALLLLDRLNQL

SEQ ID NO: 27657 - protein, 8 aa, Severe acute respiratory syndrome-related coronavirus
  REGION 1..8: note = N 368-408; Min_EDGE_Nuc; Table F
  source 1..8: note = Severe acute respiratory syndrome coronavirus 2
ETQALPQR

SEQ ID NO: 27658 - protein, 9 aa, Severe acute respiratory syndrome-related coronavirus
  REGION 1..9: note = N 39-94; Min_EDGE_Nuc; Table F
  source 1..9: note = Severe acute respiratory syndrome coronavirus 2
NTASWFTAL

SEQ ID NO: 27659 - protein, 10 aa, Severe acute respiratory syndrome-related coronavirus
  REGION 1..10: note = N 232-282; Min_EDGE_Nuc; Table F
  source 1..10: note = Severe acute respiratory syndrome coronavirus 2
SAAEASKKPR

SEQ ID NO: 27660 - protein, 11 aa, Severe acute respiratory syndrome-related coronavirus
  REGION 1..11: note = N 39-94; Min_EDGE_Nuc; Table F
  source 1..11: note = Severe acute respiratory syndrome coronavirus 2
NSSPDDQIGYY

SEQ ID NO: 27661 - protein, 9 aa, Severe acute respiratory syndrome-related coronavirus
  REGION 1..9: note = N 128-174; Min_EDGE_Nuc; Table F
  source 1..9: note = Severe acute respiratory syndrome coronavirus 2
TRNPANNAA

SEQ ID NO: 27662 - protein, 11 aa, Severe acute respiratory syndrome-related coronavirus
  REGION 1..11: note = N 283-338; Min_EDGE_Nuc; Table F
  source 1..11: note = Severe acute respiratory syndrome coronavirus 2
IGMEVTPSGTW

SEQ ID NO: 27663 - protein, 9 aa, Severe acute respiratory syndrome-related coronavirus
  REGION 1..9: note = N 128-174; Min_EDGE_Nuc; Table F
  source 1..9: note = Severe acute respiratory syndrome coronavirus 2
LPQGTTLPK

SEQ ID NO: 27664 - protein, 10 aa, Severe acute respiratory syndrome-related coronavirus
  REGION 1..10: note = N 204-239; Min_EDGE_Nuc; Table F
  source 1..10: note = Severe acute respiratory syndrome coronavirus 2
ALALLLLDRL

SEQ ID NO: 27665 - protein, 10 aa, Severe acute respiratory syndrome-related coronavirus
  REGION 1..10: note = N 283-338; Min_EDGE_Nuc; Table F
  source 1..10: note = Severe acute respiratory syndrome coronavirus 2
QELIRQGTDY

SEQ ID NO: 27666 - protein, 10 aa, Severe acute respiratory syndrome-related coronavirus
  REGION 1..10: note = N 232-282; Min_EDGE_Nuc; Table F
  source 1..10: note = Severe acute respiratory syndrome coronavirus 2
QQQQGQTVTK

SEQ ID NO: 27667 - protein, 9 aa, Severe acute respiratory syndrome-related coronavirus
  REGION 1..9: note = N 232-282; Min_EDGE_Nuc; Table F
  source 1..9: note = Severe acute respiratory syndrome coronavirus 2
GQTVTKKSA

SEQ ID NO: 27668 - protein, 8 aa, Severe acute respiratory syndrome-related coronavirus
  REGION 1..8: note = N 368-408; Min_EDGE_Nuc; Table F
  source 1..8: note = Severe acute respiratory syndrome coronavirus 2
TVTLLPAA

SEQ ID NO: 27669 - protein, 9 aa, Severe acute respiratory syndrome-related coronavirus
  REGION 1..9: note = N 283-338; Min_EDGE_Nuc; Table F
  source 1..9: note = Severe acute respiratory syndrome coronavirus 2
SAFFGMSRI

SEQ ID NO: 27670 - protein, 10 aa, Severe acute respiratory syndrome-related coronavirus
  REGION 1..10: note = N 204-239; Min_EDGE_Nuc; Table F
  source 1..10: note = Severe acute respiratory syndrome coronavirus 2
MAGNGGDAAL

SEQ ID NO: 27671 - protein, 9 aa, Severe acute respiratory syndrome-related coronavirus
  REGION 1..9: note = N 283-338; Min_EDGE_Nuc; Table F
  source 1..9: note = Severe acute respiratory syndrome coronavirus 2
AQFAPSASA

SEQ ID NO: 27672 - protein, 8 aa, Severe acute respiratory syndrome-related coronavirus
  REGION 1..8: note = N 368-408; Min_EDGE_Nuc; Table F
  source 1..8: note = Severe acute respiratory syndrome coronavirus 2
KADETQAL

SEQ ID NO: 27673 - protein, 9 aa, Severe acute respiratory syndrome-related coronavirus
  REGION 1..9: note = N 345-375; Min_EDGE_Nuc; Table F
  source 1..9: note = Severe acute respiratory syndrome coronavirus 2
KHIDAYKTF

SEQ ID NO: 27674 - protein, 9 aa, Severe acute respiratory syndrome-related coronavirus
  REGION 1..9: note = N 39-94; Min_EDGE_Nuc; Table F
  source 1..9: note = Severe acute respiratory syndrome coronavirus 2
FTALTQHGK

SEQ ID NO: 27675 - protein, 10 aa, Severe acute respiratory syndrome-related coronavirus
  REGION 1..10: note = N 232-282; Min_EDGE_Nuc; Table F
  source 1..10: note = Severe acute respiratory syndrome coronavirus 2
QQQGQTVTKK

SEQ ID NO: 27676 - protein, 11 aa, Severe acute respiratory syndrome-related coronavirus
  REGION 1..11: note = N 232-282; Min_EDGE_Nuc; Table F
  source 1..11: note = Severe acute respiratory syndrome coronavirus 2
KSAAEASKKPR

SEQ ID NO: 27677 - protein, 9 aa, Severe acute respiratory syndrome-related coronavirus
  REGION 1..9: note = N 368-408; Min_EDGE_Nuc; Table F
  source 1..9: note = Severe acute respiratory syndrome coronavirus 2
DETQALPQR

SEQ ID NO: 27678 - protein, 10 aa, Severe acute respiratory syndrome-related coronavirus
  REGION 1..10: note = N 39-94; Min_EDGE_Nuc; Table F
  source 1..10: note = Severe acute respiratory syndrome coronavirus 2
SSPDDQIGYY

SEQ ID NO: 27679 - protein, 11 aa, Severe acute respiratory syndrome-related coronavirus
  REGION 1..11: note = N 283-338; Min_EDGE_Nuc; Table F
  source 1..11: note = Severe acute respiratory syndrome coronavirus 2
EVTPSGTWLTY

SEQ ID NO: 27680 - protein, 8 aa, Severe acute respiratory syndrome-related coronavirus
  REGION 1..8: note = N 368-408; Min_EDGE_Nuc; Table F
  source 1..8: note = Severe acute respiratory syndrome coronavirus 2
RQKKQQTV

SEQ ID NO: 27681 - protein, 11 aa, Severe acute respiratory syndrome-related coronavirus
  REGION 1..11: note = N 39-94; Min_EDGE_Nuc; Table F
  source 1..11: note = Severe acute respiratory syndrome coronavirus 2
SSPDDQIGYYR

SEQ ID NO: 27682 - protein, 11 aa, Severe acute respiratory syndrome-related coronavirus
  REGION 1..11: note = N 128-174; Min_EDGE_Nuc; Table F
  source 1..11: note = Severe acute respiratory syndrome coronavirus 2
IVLQLPQGTTL

SEQ ID NO: 27683 - protein, 9 aa, Severe acute respiratory syndrome-related coronavirus
  REGION 1..9: note = N 368-408; Min_EDGE_Nuc; Table F
  source 1..9: note = Severe acute respiratory syndrome coronavirus 2
KKADETQAL

SEQ ID NO: 27684 - protein, 10 aa, Severe acute respiratory syndrome-related coronavirus
  REGION 1..10: note = N 128-174; Min_EDGE_Nuc; Table F
  source 1..10: note = Severe acute respiratory syndrome coronavirus 2
QLPQGTTLPK

SEQ ID NO: 27685 - protein, 9 aa, Severe acute respiratory syndrome-related coronavirus
  REGION 1..9: note = N 283-338; Min_EDGE_Nuc; Table F
  source 1..9: note = Severe acute respiratory syndrome coronavirus 2
RQGTDYKHW

SEQ ID NO: 27686 - protein, 9 aa, Severe acute respiratory syndrome-related coronavirus
  REGION 1..9: note = N 39-94; Min_EDGE_Nuc; Table F
  source 1..9: note = Severe acute respiratory syndrome coronavirus 2
DDQIGYYRR

SEQ ID NO: 27687 - protein, 9 aa, Severe acute respiratory syndrome-related coronavirus
  REGION 1..9: note = N 204-239; Min_EDGE_Nuc; Table F
  source 1..9: note = Severe acute respiratory syndrome coronavirus 2
AGNGGDAAL

SEQ ID NO: 27688 - protein, 9 aa, Severe acute respiratory syndrome-related coronavirus
  REGION 1..9: note = N 232-282; Min_EDGE_Nuc; Table F
  source 1..9: note = Severe acute respiratory syndrome coronavirus 2
RTATKAYNV

SEQ ID NO: 27689 - protein, 10 aa, Severe acute respiratory syndrome-related coronavirus
  REGION 1..10: note = N 345-375; Min_EDGE_Nuc; Table F
  source 1..10: note = Severe acute respiratory syndrome coronavirus 2
ILLNKHIDAY

SEQ ID NO: 27690 - protein, 8 aa, Severe acute respiratory syndrome-related coronavirus
  REGION 1..8: note = N 283-338; Min_EDGE_Nuc; Table F
  source 1..8: note = Severe acute respiratory syndrome coronavirus 2
LIRQGTDY

SEQ ID NO: 27691 - protein, 10 aa, Severe acute respiratory syndrome-related coronavirus
  REGION 1..10: note = N 128-174; Min_EDGE_Nuc; Table F
  source 1..10: note = Severe acute respiratory syndrome coronavirus 2
NTPKDHIGTR

SEQ ID NO: 27692 - protein, 9 aa, Severe acute respiratory syndrome-related coronavirus
  REGION 1..9: note = N 232-282; Min_EDGE_Nuc; Table F
  source 1..9: note = Severe acute respiratory syndrome coronavirus 2
EASKKPRQK

SEQ ID NO: 27693 - protein, 9 aa, Severe acute respiratory syndrome-related coronavirus
  REGION 1..9: note = N 283-338; Min_EDGE_Nuc; Table F
  source 1..9: note = Severe acute respiratory syndrome coronavirus 2
FAPSASAFF

SEQ ID NO: 27694 - protein, 8 aa, Severe acute respiratory syndrome-related coronavirus
  REGION 1..8: note = N 39-94; Min_EDGE_Nuc; Table F
  source 1..8: note = Severe acute respiratory syndrome coronavirus 2
LPNNTASW

SEQ ID NO: 27695 - protein, 10 aa, Severe acute respiratory syndrome-related coronavirus
  REGION 1..10: note = N 283-338; Min_EDGE_Nuc; Table F
  source 1..10: note = Severe acute respiratory syndrome coronavirus 2
SASAFFGMSR

SEQ ID NO: 27696 - protein, 8 aa, Severe acute respiratory syndrome-related coronavirus
  REGION 1..8: note = N 128-174; Min_EDGE_Nuc; Table F
  source 1..8: note = Severe acute respiratory syndrome coronavirus 2
NAAIVLQL

SEQ ID NO: 27697 - protein, 10 aa, Severe acute respiratory syndrome-related coronavirus
  REGION 1..10: note = N 232-282; Min_EDGE_Nuc; Table F
  source 1..10: note = Severe acute respiratory syndrome coronavirus 2
RQKRTATKAY

SEQ ID NO: 27698 - protein, 10 aa, Severe acute respiratory syndrome-related coronavirus
  REGION 1..10: note = N 283-338; Min_EDGE_Nuc; Table F
  source 1..10: note = Severe acute respiratory syndrome coronavirus 2
YKHWPQIAQF

SEQ ID NO: 27699 - protein, 9 aa, Severe acute respiratory syndrome-related coronavirus
  REGION 1..9: note = N 232-282; Min_EDGE_Nuc; Table F
  source 1..9: note = Severe acute respiratory syndrome coronavirus 2
QKRTATKAY

SEQ ID NO: 27700 - protein, 9 aa, Severe acute respiratory syndrome-related coronavirus
  REGION 1..9: note = N 368-408; Min_EDGE_Nuc; Table F
  source 1..9: note = Severe acute respiratory syndrome coronavirus 2
TQALPQRQK

SEQ ID NO: 27701 - protein, 10 aa, Severe acute respiratory syndrome-related coronavirus
  REGION 1..10: note = N 283-338; Min_EDGE_Nuc; Table F
  source 1..10: note = Severe acute respiratory syndrome coronavirus 2
APSASAFFGM

SEQ ID NO: 27702 - protein, 10 aa, Severe acute respiratory syndrome-related coronavirus
  REGION 1..10: note = ORF3a 12-55; Min_EDGE_ORF3a; Table F
  source 1..10: note = Severe acute respiratory syndrome coronavirus 2
TPSDFVRATA

SEQ ID NO: 27703 - protein, 9 aa, Severe acute respiratory syndrome-related coronavirus
  REGION 1..9: note = ORF3a 198-254; Min_EDGE_ORF3a; Table F
  source 1..9: note = Severe acute respiratory syndrome coronavirus 2
IVDEPEEHV

SEQ ID NO: 27704 - protein, 10 aa, Severe acute respiratory syndrome-related coronavirus
  REGION 1..10: note = ORF3a 168-198; Min_EDGE_ORF3a; Table F
  source 1..10: note = Severe acute respiratory syndrome coronavirus 2
YQIGGYTEKW

SEQ ID NO: 27705 - protein, 11 aa, Severe acute respiratory syndrome-related coronavirus
  REGION 1..11: note = ORF3a 168-198; Min_EDGE_ORF3a; Table F
  source 1..11: note = Severe acute respiratory syndrome coronavirus 2
GTTSPISEHDY

SEQ ID NO: 27706 - protein, 10 aa, Severe acute respiratory syndrome-related coronavirus
  REGION 1..10: note = ORF3a 168-198; Min_EDGE_ORF3a; Table F
  source 1..10: note = Severe acute respiratory syndrome coronavirus 2
TTSPISEHDY

SEQ ID NO: 27707 - protein, 10 aa, Severe acute respiratory syndrome-related coronavirus
  REGION 1..10: note = ORF3a 12-55; Min_EDGE_ORF3a; Table F
  source 1..10: note = Severe acute respiratory syndrome coronavirus 2
EIKDATPSDF

SEQ ID NO: 27708 - protein, 9 aa, Severe acute respiratory syndrome-related coronavirus
  REGION 1..9: note = ORF3a 198-254; Min_EDGE_ORF3a; Table F
  source 1..9: note = Severe acute respiratory syndrome coronavirus 2
EEHVQIHTI

SEQ ID NO: 27709 - protein, 9 aa, Severe acute respiratory syndrome-related coronavirus
  REGION 1..9: note = ORF3a 101-152; Min_EDGE_ORF3a; Table F
  source 1..9: note = Severe acute respiratory syndrome coronavirus 2
QSINFVRII

SEQ ID NO: 27710 - protein, 8 aa, Severe acute respiratory syndrome-related coronavirus
  REGION 1..8: note = ORF3a 52-85; Min_EDGE_ORF3a; Table F
  source 1..8: note = Severe acute respiratory syndrome coronavirus 2
SASKIITL

SEQ ID NO: 27711 - protein, 9 aa, Severe acute respiratory syndrome-related coronavirus
  REGION 1..9: note = ORF3a 198-254; Min_EDGE_ORF3a; Table F
  source 1..9: note = Severe acute respiratory syndrome coronavirus 2
HSYFTSDYY

SEQ ID NO: 27712 - protein, 11 aa, Severe acute respiratory syndrome-related coronavirus
  REGION 1..11: note = ORF3a 198-254; Min_EDGE_ORF3a; Table F
  source 1..11: note = Severe acute respiratory syndrome coronavirus 2
IVDEPEEHVQI

SEQ ID NO: 27713 - protein, 8 aa, Severe acute respiratory syndrome-related coronavirus
  REGION 1..8: note = ORF3a 101-152; Min_EDGE_ORF3a; Table F
  source 1..8: note = Severe acute respiratory syndrome coronavirus 2
RSKNPLLY

SEQ ID NO: 27714 - protein, 9 aa, Severe acute respiratory syndrome-related coronavirus
  REGION 1..9: note = ORF3a 12-55; Min_EDGE_ORF3a; Table F
  source 1..9: note = Severe acute respiratory syndrome coronavirus 2
ATIPIQASL

SEQ ID NO: 27715 - protein, 8 aa, Severe acute respiratory syndrome-related coronavirus
  REGION 1..8: note = ORF3a 198-254; Min_EDGE_ORF3a; Table F
  source 1..8: note = Severe acute respiratory syndrome coronavirus 2
EHVQIHTI

SEQ ID NO: 27716 - protein, 9 aa, Severe acute respiratory syndrome-related coronavirus
  REGION 1..9: note = ORF3a 52-85; Min_EDGE_ORF3a; Table F
  source 1..9: note = Severe acute respiratory syndrome coronavirus 2
ITLKKRWQL

SEQ ID NO: 27717 - protein, 8 aa, Severe acute respiratory syndrome-related coronavirus
  REGION 1..8: note = ORF3a 198-254; Min_EDGE_ORF3a; Table F
  source 1..8: note = Severe acute respiratory syndrome coronavirus 2
SYFTSDYY

SEQ ID NO: 27718 - protein, 10 aa, Severe acute respiratory syndrome-related coronavirus
  REGION 1..10: note = ORF3a 198-254; Min_EDGE_ORF3a; Table F
  source 1..10: note = Severe acute respiratory syndrome coronavirus 2
YFTSDYYQLY

SEQ ID NO: 27719 - protein, 11 aa, Severe acute respiratory syndrome-related coronavirus
  REGION 1..11: note = ORF3a 198-254; Min_EDGE_ORF3a; Table F
  source 1..11: note = Severe acute respiratory syndrome coronavirus 2
STDTGVEHVTF

SEQ ID NO: 27720 - protein, 9 aa, Severe acute respiratory syndrome-related coronavirus
  REGION 1..9: note = ORF3a 12-55; Min_EDGE_ORF3a; Table F
  source 1..9: note = Severe acute respiratory syndrome coronavirus 2
DATPSDFVR

SEQ ID NO: 27721 - protein, 9 aa, Severe acute respiratory syndrome-related coronavirus
  REGION 1..9: note = ORF3a 168-198; Min_EDGE_ORF3a; Table F
  source 1..9: note = Severe acute respiratory syndrome coronavirus 2
EHDYQIGGY

SEQ ID NO: 27722 - protein, 9 aa, Severe acute respiratory syndrome-related coronavirus
  REGION 1..9: note = ORF3a 198-254; Min_EDGE_ORF3a; Table F
  source 1..9: note = Severe acute respiratory syndrome coronavirus 2
STDTGVEHV

SEQ ID NO: 27723 - protein, 8 aa, Severe acute respiratory syndrome-related coronavirus
  REGION 1..8: note = ORF3a 168-198; Min_EDGE_ORF3a; Table F
  source 1..8: note = Severe acute respiratory syndrome coronavirus 2
IGGYTEKW

SEQ ID NO: 27724 - protein, 11 aa, Severe acute respiratory syndrome-related coronavirus
  REGION 1..11: note = ORF3a 12-55; Min_EDGE_ORF3a; Table F
  source 1..11: note = Severe acute respiratory syndrome coronavirus 2
IPIQASLPFGW

SEQ ID NO: 27725 - protein, 11 aa, Severe acute respiratory syndrome-related coronavirus
  REGION 1..11: note = ORF3a 12-55; Min_EDGE_ORF3a; Table F
  source 1..11: note = Severe acute respiratory syndrome coronavirus 2
GEIKDATPSDF

SEQ ID NO: 27726 - protein, 10 aa, Severe acute respiratory syndrome-related coronavirus
  REGION 1..10: note = ORF3a 168-198; Min_EDGE_ORF3a; Table F
  source 1..10: note = Severe acute respiratory syndrome coronavirus 2
SPISEHDYQI

SEQ ID NO: 27727 - protein, 9 aa, Severe acute respiratory syndrome-related coronavirus
  REGION 1..9: note = ORF3a 101-152; Min_EDGE_ORF3a; Table F
  source 1..9: note = Severe acute respiratory syndrome coronavirus 2
ALVYFLQSI

SEQ ID NO: 27728 - protein, 9 aa, Severe acute respiratory syndrome-related coronavirus
  REGION 1..9: note = ORF3a 12-55; Min_EDGE_ORF3a; Table F
  source 1..9: note = Severe acute respiratory syndrome coronavirus 2
TPSDFVRAT

SEQ ID NO: 27729 - protein, 9 aa, Severe acute respiratory syndrome-related coronavirus
  REGION 1..9: note = ORF3a 101-152; Min_EDGE_ORF3a; Table F
  source 1..9: note = Severe acute respiratory syndrome coronavirus 2
NPLLYDANY

SEQ ID NO: 27730 - protein, 10 aa, Severe acute respiratory syndrome-related coronavirus
  REGION 1..10: note = ORF3a 168-198; Min_EDGE_ORF3a; Table F
  source 1..10: note = Severe acute respiratory syndrome coronavirus 2
SEHDYQIGGY

SEQ ID NO: 27731 - protein, 9 aa, Severe acute respiratory syndrome-related coronavirus
  REGION 1..9: note = ORF3a 101-152; Min_EDGE_ORF3a; Table F
  source 1..9: note = Severe acute respiratory syndrome coronavirus 2
FLQSINFVR

SEQ ID NO: 27732 - protein, 9 aa, Severe acute respiratory syndrome-related coronavirus
  REGION 1..9: note = ORF3a 198-254; Min_EDGE_ORF3a; Table F
  source 1..9: note = Severe acute respiratory syndrome coronavirus 2
HVTFFIYNK

SEQ ID NO: 27733 - protein, 8 aa, Severe acute respiratory syndrome-related coronavirus
  REGION 1..8: note = ORF3a 52-85; Min_EDGE_ORF3a; Table F
  source 1..8: note = Severe acute respiratory syndrome coronavirus 2
TLKKRWQL

SEQ ID NO: 27734 - protein, 11 aa, Severe acute respiratory syndrome-related coronavirus
  REGION 1..11: note = ORF3a 198-254; Min_EDGE_ORF3a; Table F
  source 1..11: note = Severe acute respiratory syndrome coronavirus 2
SYFTSDYYQLY

SEQ ID NO: 27735 - protein, 11 aa, Severe acute respiratory syndrome-related coronavirus
  REGION 1..11: note = ORF3a 198-254; Min_EDGE_ORF3a; Table F
  source 1..11: note = Severe acute respiratory syndrome coronavirus 2
QLSTDTGVEHV

SEQ ID NO: 27736 - protein, 8 aa, Severe acute respiratory syndrome-related coronavirus
  REGION 1..8: note = ORF3a 12-55; Min_EDGE_ORF3a; Table F
  source 1..8: note = Severe acute respiratory syndrome coronavirus 2
LPFGWLIV

SEQ ID NO: 27737 - protein, 9 aa, Severe acute respiratory syndrome-related coronavirus
  REGION 1..9: note = ORF3a 198-254; Min_EDGE_ORF3a; Table F
  source 1..9: note = Severe acute respiratory syndrome coronavirus 2
VTFFIYNKI

SEQ ID NO: 27738 - protein, 8 aa, Severe acute respiratory syndrome-related coronavirus
  REGION 1..8: note = ORF3a 198-254; Min_EDGE_ORF3a; Table F
  source 1..8: note = Severe acute respiratory syndrome coronavirus 2
TSDYYQLY

SEQ ID NO: 27739 - protein, 9 aa, Severe acute respiratory syndrome-related coronavirus
  REGION 1..9: note = ORF3a 198-254; Min_EDGE_ORF3a; Table F
  source 1..9: note = Severe acute respiratory syndrome coronavirus 2
YFTSDYYQL

SEQ ID NO: 27740 - protein, 8 aa, Severe acute respiratory syndrome-related coronavirus
  REGION 1..8: note = ORF3a 12-55; Min_EDGE_ORF3a; Table F
  source 1..8: note = Severe acute respiratory syndrome coronavirus 2
TPSDFVRA

SEQ ID NO: 27741 - protein, 9 aa, Severe acute respiratory syndrome-related coronavirus
  REGION 1..9: note = ORF3a 168-198; Min_EDGE_ORF3a; Table F
  source 1..9: note = Severe acute respiratory syndrome coronavirus 2
QIGGYTEKW

SEQ ID NO: 27742 - protein, 10 aa, Severe acute respiratory syndrome-related coronavirus
  REGION 1..10: note = ORF3a 198-254; Min_EDGE_ORF3a; Table F
  source 1..10: note = Severe acute respiratory syndrome coronavirus 2
TDTGVEHVTF

SEQ ID NO: 27743 - protein, 9 aa, Severe acute respiratory syndrome-related coronavirus
  REGION 1..9: note = ORF3a 101-152; Min_EDGE_ORF3a; Table F
  source 1..9: note = Severe acute respiratory syndrome coronavirus 2
SINFVRIIM

SEQ ID NO: 27744 - protein, 9 aa, Severe acute respiratory syndrome-related coronavirus
  REGION 1..9: note = ORF3a 52-85; Min_EDGE_ORF3a; Table F
  source 1..9: note = Severe acute respiratory syndrome coronavirus 2
KRWQLALSK

SEQ ID NO: 27745 - protein, 9 aa, Severe acute respiratory syndrome-related coronavirus
  REGION 1..9: note = ORF3a 12-55; Min_EDGE_ORF3a; Table F
  source 1..9: note = Severe acute respiratory syndrome coronavirus 2
ATATIPIQA

SEQ ID NO: 27746 - protein, 9 aa, Severe acute respiratory syndrome-related coronavirus
  REGION 1..9: note = ORF3a 198-254; Min_EDGE_ORF3a; Table F
  source 1..9: note = Severe acute respiratory syndrome coronavirus 2
TGVEHVTFF

SEQ ID NO: 27747 - protein, 9 aa, Severe acute respiratory syndrome-related coronavirus
  REGION 1..9: note = ORF3a 198-254; Min_EDGE_ORF3a; Table F
  source 1..9: note = Severe acute respiratory syndrome coronavirus 2
TQLSTDTGV

SEQ ID NO: 27748 - protein, 9 aa, Severe acute respiratory syndrome-related coronavirus
  REGION 1..9: note = ORF3a 52-85; Min_EDGE_ORF3a; Table F
  source 1..9: note = Severe acute respiratory syndrome coronavirus 2
ASKIITLKK

SEQ ID NO: 27749 - protein, 10 aa, Severe acute respiratory syndrome-related coronavirus
  REGION 1..10: note = ORF3a 12-55; Min_EDGE_ORF3a; Table F
  source 1..10: note = Severe acute respiratory syndrome coronavirus 2
LPFGWLIVGV

SEQ ID NO: 27750 - protein, 11 aa, Severe acute respiratory syndrome-related coronavirus
  REGION 1..11: note = ORF3a 12-55; Min_EDGE_ORF3a; Table F
  source 1..11: note = Severe acute respiratory syndrome coronavirus 2
EIKDATPSDFV

SEQ ID NO: 27751 - protein, 8 aa, Severe acute respiratory syndrome-related coronavirus
  REGION 1..8: note = N 368-408; Min_EDGE_Nuc_expl.; Table F
  source 1..8: note = Severe acute respiratory syndrome coronavirus 2
KQQTVTLL

SEQ ID NO: 27752 - protein, 8 aa, Severe acute respiratory syndrome-related coronavirus
  REGION 1..8: note = N 128-174; Min_EDGE_Nuc_expl.; Table F
  source 1..8: note = Severe acute respiratory syndrome coronavirus 2
PQGTTLPK

SEQ ID NO: 27753 - protein, 11 aa, Severe acute respiratory syndrome-related coronavirus
  REGION 1..11: note = N 204-239; Min_EDGE_Nuc_expl.; Table F
  source 1..11: note = Severe acute respiratory syndrome coronavirus 2
RMAGNGGDAAL

SEQ ID NO: 27754 - protein, 8 aa, Severe acute respiratory syndrome-related coronavirus
  REGION 1..8: note = N 232-282; Min_EDGE_Nuc_expl.; Table F
  source 1..8: note = Severe acute respiratory syndrome coronavirus 2
NVTQAFGR

SEQ ID NO: 27755 - protein, 11 aa, Severe acute respiratory syndrome-related coronavirus
  REGION 1..11: note = N 232-282; Min_EDGE_Nuc_expl.; Table F
  source 1..11: note = Severe acute respiratory syndrome coronavirus 2
ATKAYNVTQAF

SEQ ID NO: 27756 - protein, 10 aa, Severe acute respiratory syndrome-related coronavirus
  REGION 1..10: note = N 232-282; Min_EDGE_Nuc_expl.; Table F
  source 1..10: note = Severe acute respiratory syndrome coronavirus 2
KAYNVTQAFG

SEQ ID NO: 27757 - protein, 9 aa, Severe acute respiratory syndrome-related coronavirus
  REGION 1..9: note = N 128-174; Min_EDGE_Nuc_expl.; Table F
  source 1..9: note = Severe acute respiratory syndrome coronavirus 2
DHIGTRNPA

SEQ ID NO: 27758 - protein, 9 aa, Severe acute respiratory syndrome-related coronavirus
  REGION 1..9: note = N 368-408; Min_EDGE_Nuc_expl.; Table F
  source 1..9: note = Severe acute respiratory syndrome coronavirus 2
KKQQTVTLL

SEQ ID NO: 27759 - protein, 8 aa, Severe acute respiratory syndrome-related coronavirus
  REGION 1..8: note = N 39-94; Min_EDGE_Nuc_expl.; Table F
  source 1..8: note = Severe acute respiratory syndrome coronavirus 2
DDQIGYYR

SEQ ID NO: 27760 - protein, 8 aa, Severe acute respiratory syndrome-related coronavirus
  REGION 1..8: note = N 232-282; Min_EDGE_Nuc_expl.; Table F
  source 1..8: note = Severe acute respiratory syndrome coronavirus 2
QQQQGQTV

SEQ ID NO: 27761 - protein, 8 aa, Severe acute respiratory syndrome-related coronavirus
  REGION 1..8: note = N 283-338; Min_EDGE_Nuc_expl.; Table F
  source 1..8: note = Severe acute respiratory syndrome coronavirus 2
MSRIGMEV

SEQ ID NO: 27762 - protein, 8 aa, Severe acute respiratory syndrome-related coronavirus
  REGION 1..8: note = N 128-174; Min_EDGE_Nuc_expl.; Table F
  source 1..8: note = Severe acute respiratory syndrome coronavirus 2
QLPQGTTL

SEQ ID NO: 27763 - protein, 10 aa, Severe acute respiratory syndrome-related coronavirus
  REGION 1..10: note = N 39-94; Min_EDGE_Nuc_expl.; Table F
  source 1..10: note = Severe acute respiratory syndrome coronavirus 2
NSSPDDQIGY

SEQ ID NO: 27764 - protein, 9 aa, Severe acute respiratory syndrome-related coronavirus
  REGION 1..9: note = N 283-338; Min_EDGE_Nuc_expl.; Table F
  source 1..9: note = Severe acute respiratory syndrome coronavirus 2
FFGMSRIGM

SEQ ID NO: 27765 - protein, 11 aa, Severe acute respiratory syndrome-related coronavirus
  REGION 1..11: note = N 232-282; Min_EDGE_Nuc_expl.; Table F
  source 1..11: note = Severe acute respiratory syndrome coronavirus 2
QQQQGQTVTKK

SEQ ID NO: 27766 - protein, 11 aa, Severe acute respiratory syndrome-related coronavirus
  REGION 1..11: note = N 39-94; Min_EDGE_Nuc_expl.; Table F
  source 1..11: note = Severe acute respiratory syndrome coronavirus 2
LPNNTASWFTA

SEQ ID NO: 27767 - protein, 8 aa, Severe acute respiratory syndrome-related coronavirus
  REGION 1..8: note = N 39-94; Min_EDGE_Nuc_expl.; Table F
  source 1..8: note = Severe acute respiratory syndrome coronavirus 2
SPDDQIGY

SEQ ID NO: 27768 - protein, 10 aa, Severe acute respiratory syndrome-related coronavirus
  REGION 1..10: note = N 39-94; Min_EDGE_Nuc_expl.; Table F
  source 1..10: note = Severe acute respiratory syndrome coronavirus 2
SPDDQIGYYR

SEQ ID NO: 27769 - protein, 9 aa, Severe acute respiratory syndrome-related coronavirus
  REGION 1..9: note = N 283-338; Min_EDGE_Nuc_expl.; Table F
  source 1..9: note = Severe acute respiratory syndrome coronavirus 2
TDYKHWPQI

SEQ ID NO: 27770 - protein, 9 aa, Severe acute respiratory syndrome-related coronavirus
  REGION 1..9: note = N 232-282; Min_EDGE_Nuc_expl.; Table F
  source 1..9: note = Severe acute respiratory syndrome coronavirus 2
YNVTQAFGR

SEQ ID NO: 27771 - protein, 11 aa, Severe acute respiratory syndrome-related coronavirus
  REGION 1..11: note = N 368-408; Min_EDGE_Nuc_expl.; Table F
  source 1..11: note = Severe acute respiratory syndrome coronavirus 2
KADETQALPQR

SEQ ID NO: 27772 - protein, 9 aa, Severe acute respiratory syndrome-related coronavirus
  REGION 1..9: note = N 128-174; Min_EDGE_Nuc_expl.; Table F
  source 1..9: note = Severe acute respiratory syndrome coronavirus 2
PANNAAIVL

SEQ ID NO: 27773 - protein, 9 aa, Severe acute respiratory syndrome-related coronavirus
  REGION 1..9: note = N 39-94; Min_EDGE_Nuc_expl.; Table F
  source 1..9: note = Severe acute respiratory syndrome coronavirus 2
GLPNNTASW

SEQ ID NO: 27774 - protein, 8 aa, Severe acute respiratory syndrome-related coronavirus
  REGION 1..8: note = N 283-338; Min_EDGE_Nuc_expl.; Table F
  source 1..8: note = Severe acute respiratory syndrome coronavirus 2
FAPSASAF

SEQ ID NO: 27775 - protein, 8 aa, Severe acute respiratory syndrome-related coronavirus
  REGION 1..8: note = N 283-338; Min_EDGE_Nuc_expl.; Table F
  source 1..8: note = Severe acute respiratory syndrome coronavirus 2
FGMSRIGM

SEQ ID NO: 27776 - protein, 10 aa, Severe acute respiratory syndrome-related coronavirus
  REGION 1..10: note = N 283-338; Min_EDGE_Nuc_expl.; Table F
  source 1..10: note = Severe acute respiratory syndrome coronavirus 2
VTPSGTWLTY

SEQ ID NO: 27777 - protein, 8 aa, Severe acute respiratory syndrome-related coronavirus
  REGION 1..8: note = N 204-239; Min_EDGE_Nuc_expl.; Table F
  source 1..8: note = Severe acute respiratory syndrome coronavirus 2
LLDRLNQL

SEQ ID NO: 27778 - protein, 8 aa, Severe acute respiratory syndrome-related coronavirus
  REGION 1..8: note = N 283-338; Min_EDGE_Nuc_expl.; Table F
  source 1..8: note = Severe acute respiratory syndrome coronavirus 2
APSASAFF

SEQ ID NO: 27779 - protein, 9 aa, Severe acute respiratory syndrome-related coronavirus
  REGION 1..9: note = N 368-408; Min_EDGE_Nuc_expl.; Table F
  source 1..9: note = Severe acute respiratory syndrome coronavirus 2
QTVTLLPAA

SEQ ID NO: 27780 - protein, 10 aa, Severe acute respiratory syndrome-related coronavirus
  REGION 1..10: note = N 204-239; Min_EDGE_Nuc_expl.; Table F
  source 1..10: note = Severe acute respiratory syndrome coronavirus 2
DRLNQLESKM

SEQ ID NO: 27781 - protein, 9 aa, Severe acute respiratory syndrome-related coronavirus
  REGION 1..9: note = N 204-239; Min_EDGE_Nuc_expl.; Table F
  source 1..9: note = Severe acute respiratory syndrome coronavirus 2
NGGDAALAL

SEQ ID NO: 27782 - protein, 9 aa, Severe acute respiratory syndrome-related coronavirus
  REGION 1..9: note = N 204-239; Min_EDGE_Nuc_expl.; Table F
  source 1..9: note = Severe acute respiratory syndrome coronavirus 2
DAALALLLL

SEQ ID NO: 27783 - protein, 8 aa, Severe acute respiratory syndrome-related coronavirus
  REGION 1..8: note = N 232-282; Min_EDGE_Nuc_expl.; Table F
  source 1..8: note = Severe acute respiratory syndrome coronavirus 2
TATKAYNV

SEQ ID NO: 27784 - protein, 9 aa, Severe acute respiratory syndrome-related coronavirus
  REGION 1..9: note = N 232-282; Min_EDGE_Nuc_expl.; Table F
  source 1..9: note = Severe acute respiratory syndrome coronavirus 2
QQGQTVTKK

SEQ ID NO: 27785 - protein, 11 aa, Severe acute respiratory syndrome-related coronavirus
  REGION 1..11: note = N 39-94; Min_EDGE_Nuc_expl.; Table F
  source 1..11: note = Severe acute respiratory syndrome coronavirus 2
LTQHGKEDLKF

SEQ ID NO: 27786 - protein, 8 aa, Severe acute respiratory syndrome-related coronavirus
  REGION 1..8: note = N 283-338; Min_EDGE_Nuc_expl.; Table F
  source 1..8: note = Severe acute respiratory syndrome coronavirus 2
AFFGMSRI

SEQ ID NO: 27787 - protein, 10 aa, Severe acute respiratory syndrome-related coronavirus
  REGION 1..10: note = N 368-408; Min_EDGE_Nuc_expl.; Table F
  source 1..10: note = Severe acute respiratory syndrome coronavirus 2
RQKKQQTVTL

SEQ ID NO: 27788 - protein, 9 aa, Severe acute respiratory syndrome-related coronavirus
  REGION 1..9: note = N 128-174; Min_EDGE_Nuc_expl.; Table F
  source 1..9: note = Severe acute respiratory syndrome coronavirus 2
NNAAIVLQL

SEQ ID NO: 27789 - protein, 10 aa, Severe acute respiratory syndrome-related coronavirus
  REGION 1..10: note = N 283-338; Min_EDGE_Nuc_expl.; Table F
  source 1..10: note = Severe acute respiratory syndrome coronavirus 2
AFFGMSRIGM

SEQ ID NO: 27790 - protein, 11 aa, Severe acute respiratory syndrome-related coronavirus
  REGION 1..11: note = N 128-174; Min_EDGE_Nuc_expl.; Table F
  source 1..11: note = Severe acute respiratory syndrome coronavirus 2
LQLPQGTTLPK

SEQ ID NO: 27791 - protein, 9 aa, Severe acute respiratory syndrome-related coronavirus
  REGION 1..9: note = N 39-94; Min_EDGE_Nuc_expl.; Table F
  source 1..9: note = Severe acute respiratory syndrome coronavirus 2
SWFTALTQH

SEQ ID NO: 27792 - protein, 11 aa, Severe acute respiratory syndrome-related coronavirus
  REGION 1..11: note = N 283-338; Min_EDGE_Nuc_expl.; Table F
  source 1..11: note = Severe acute respiratory syndrome coronavirus 2
GMSRIGMEVTP

SEQ ID NO: 27793 - protein, 9 aa, Severe acute respiratory syndrome-related coronavirus
  REGION 1..9: note = N 368-408; Min_EDGE_Nuc_expl.; Table F
  source 1..9: note = Severe acute respiratory syndrome coronavirus 2
QKKQQTVTL

SEQ ID NO: 27794 - protein, 9 aa, Severe acute respiratory syndrome-related coronavirus
  REGION 1..9: note = N 232-282; Min_EDGE_Nuc_expl.; Table F
  source 1..9: note = Severe acute respiratory syndrome coronavirus 2
TKAYNVTQA

SEQ ID NO: 27795 - protein, 11 aa, Severe acute respiratory syndrome-related coronavirus
  REGION 1..11: note = N 345-375; Min_EDGE_Nuc_expl.; Table F
  source 1..11: note = Severe acute respiratory syndrome coronavirus 2
VILLNKHIDAY

SEQ ID NO: 27796 - protein, 10 aa, Severe acute respiratory syndrome-related coronavirus
  REGION 1..10: note = N 39-94; Min_EDGE_Nuc_expl.; Table F
  source 1..10: note = Severe acute respiratory syndrome coronavirus 2
QGLPNNTASW

SEQ ID NO: 27797 - protein, 10 aa, Severe acute respiratory syndrome-related coronavirus
  REGION 1..10: note = N 39-94; Min_EDGE_Nuc_expl.; Table F
  source 1..10: note = Severe acute respiratory syndrome coronavirus 2
HGKEDLKFPR

SEQ ID NO: 27798 - protein, 9 aa, Severe acute respiratory syndrome-related coronavirus
  REGION 1..9: note = N 368-408; Min_EDGE_Nuc_expl.; Table F
  source 1..9: note = Severe acute respiratory syndrome coronavirus 2
KQQTVTLLP

SEQ ID NO: 27799 - protein, 11 aa, Severe acute respiratory syndrome-related coronavirus
  REGION 1..11: note = N 368-408; Min_EDGE_Nuc_expl.; Table F
  source 1..11: note = Severe acute respiratory syndrome coronavirus 2
TLLPAADLDDF

SEQ ID NO: 27800 - protein, 9 aa, Severe acute respiratory syndrome-related coronavirus
  REGION 1..9: note = N 232-282; Min_EDGE_Nuc_expl.; Table F
  source 1..9: note = Severe acute respiratory syndrome coronavirus 2
ATKAYNVTQ

SEQ ID NO: 27801 - protein, 11 aa, Severe acute respiratory syndrome-related coronavirus
  REGION 1..11: note = N 368-408; Min_EDGE_Nuc_expl.; Table F
  source 1..11: note = Severe acute respiratory syndrome coronavirus 2
LPQRQKKQQTV

SEQ ID NO: 27802 - protein, 9 aa, Severe acute respiratory syndrome-related coronavirus
  REGION 1..9: note = N 128-174; Min_EDGE_Nuc_expl.; Table F
  source 1..9: note = Severe acute respiratory syndrome coronavirus 2
TEGALNTPK

SEQ ID NO: 27803 - protein, 9 aa, Severe acute respiratory syndrome-related coronavirus
  REGION 1..9: note = N 368-408; Min_EDGE_Nuc_expl.; Table F
  source 1..9: note = Severe acute respiratory syndrome coronavirus 2
ETQALPQRQ

SEQ ID NO: 27804 - protein, 9 aa, Severe acute respiratory syndrome-related coronavirus
  REGION 1..9: note = N 283-338; Min_EDGE_Nuc_expl.; Table F
  source 1..9: note = Severe acute respiratory syndrome coronavirus 2
EVTPSGTWL

SEQ ID NO: 27805 - protein, 9 aa, Severe acute respiratory syndrome-related coronavirus
  REGION 1..9: note = N 368-408; Min_EDGE_Nuc_expl.; Table F
  source 1..9: note = Severe acute respiratory syndrome coronavirus 2
QQTVTLLPA

SEQ ID NO: 27806 - protein, 11 aa, Severe acute respiratory syndrome-related coronavirus
  REGION 1..11: note = N 128-174; Min_EDGE_Nuc_expl.; Table F
  source 1..11: note = Severe acute respiratory syndrome coronavirus 2
LNTPKDHIGTR

SEQ ID NO: 27807 - protein, 9 aa, Severe acute respiratory syndrome-related coronavirus
  REGION 1..9: note = N 128-174; Min_EDGE_Nuc_expl.; Table F
  source 1..9: note = Severe acute respiratory syndrome coronavirus 2
NPANNAAIV

SEQ ID NO: 27808 - protein, 11 aa, Severe acute respiratory syndrome-related coronavirus
  REGION 1..11: note = N 128-174; Min_EDGE_Nuc_expl.; Table F
  source 1..11: note = Severe acute respiratory syndrome coronavirus 2
VATEGALNTPK

SEQ ID NO: 27809 - protein, 8 aa, Severe acute respiratory syndrome-related coronavirus
  REGION 1..8: note = N 128-174; Min_EDGE_Nuc_expl.; Table F
  source 1..8: note = Severe acute respiratory syndrome coronavirus 2
NPANNAAI

SEQ ID NO: 27810 - protein, 10 aa, Severe acute respiratory syndrome-related coronavirus
  REGION 1..10: note = N 283-338; Min_EDGE_Nuc_expl.; Table F
  source 1..10: note = Severe acute respiratory syndrome coronavirus 2
TDYKHWPQIA

SEQ ID NO: 27811 - protein, 8 aa, Severe acute respiratory syndrome-related coronavirus
  REGION 1..8: note = N 39-94; Min_EDGE_Nuc_expl.; Table F
  source 1..8: note = Severe acute respiratory syndrome coronavirus 2
PDDQIGYY

SEQ ID NO: 27812 - protein, 9 aa, Severe acute respiratory syndrome-related coronavirus
  REGION 1..9: note = N 283-338; Min_EDGE_Nuc_expl.; Table F
  source 1..9: note = Severe acute respiratory syndrome coronavirus 2
QIAQFAPSA

SEQ ID NO: 27813 - protein, 8 aa, Severe acute respiratory syndrome-related coronavirus
  REGION 1..8: note = N 345-375; Min_EDGE_Nuc_expl.; Table F
  source 1..8: note = Severe acute respiratory syndrome coronavirus 2
LNKHIDAY

SEQ ID NO: 27814 - protein, 11 aa, Severe acute respiratory syndrome-related coronavirus
  REGION 1..11: note = N 345-375; Min_EDGE_Nuc_expl.; Table F
  source 1..11: note = Severe acute respiratory syndrome coronavirus 2
AYKTFPPTEPK

SEQ ID NO: 27815 - protein, 8 aa, Severe acute respiratory syndrome-related coronavirus
  REGION 1..8: note = N 232-282; Min_EDGE_Nuc_expl.; Table F
  source 1..8: note = Severe acute respiratory syndrome coronavirus 2
QQGQTVTK

SEQ ID NO: 27816 - protein, 9 aa, Severe acute respiratory syndrome-related coronavirus
  REGION 1..9: note = N 232-282; Min_EDGE_Nuc_expl.; Table F
  source 1..9: note = Severe acute respiratory syndrome coronavirus 2
QQQQGQTVT

SEQ ID NO: 27817 - protein, 9 aa, Severe acute respiratory syndrome-related coronavirus
  REGION 1..9: note = N 283-338; Min_EDGE_Nuc_expl.; Table F
  source 1..9: note = Severe acute respiratory syndrome coronavirus 2
SRIGMEVTP

SEQ ID NO: 27818 - protein, 10 aa, Severe acute respiratory syndrome-related coronavirus
  REGION 1..10: note = N 232-282; Min_EDGE_Nuc_expl.; Table F
  source 1..10: note = Severe acute respiratory syndrome coronavirus 2
AYNVTQAFGR

SEQ ID NO: 27819 - protein, 9 aa, Severe acute respiratory syndrome-related coronavirus
  REGION 1..9: note = N 368-408; Min_EDGE_Nuc_expl.; Table F
  source 1..9: note = Severe acute respiratory syndrome coronavirus 2
QALPQRQKK

SEQ ID NO: 27820 - protein, 10 aa, Severe acute respiratory syndrome-related coronavirus
  REGION 1..10: note = N 128-174; Min_EDGE_Nuc_expl.; Table F
  source 1..10: note = Severe acute respiratory syndrome coronavirus 2
TRNPANNAAI

SEQ ID NO: 27821 - protein, 8 aa, Severe acute respiratory syndrome-related coronavirus
  REGION 1..8: note = N 283-338; Min_EDGE_Nuc_expl.; Table F
  source 1..8: note = Severe acute respiratory syndrome coronavirus 2
VTPSGTWL

SEQ ID NO: 27822 - protein, 9 aa, Severe acute respiratory syndrome-related coronavirus
  REGION 1..9: note = N 39-94; Min_EDGE_Nuc_expl.; Table F
  source 1..9: note = Severe acute respiratory syndrome coronavirus 2
LPNNTASWF

SEQ ID NO: 27823 - protein, 9 aa, Severe acute respiratory syndrome-related coronavirus
  REGION 1..9: note = N 99-118; Min_EDGE_Nuc_expl.; Table F
  source 1..9: note = Severe acute respiratory syndrome coronavirus 2
LSPRWYFYY

SEQ ID NO: 27824 - protein, 10 aa, Severe acute respiratory syndrome-related coronavirus
  REGION 1..10: note = N 232-282; Min_EDGE_Nuc_expl.; Table F
  source 1..10: note = Severe acute respiratory syndrome coronavirus 2
GQQQQGQTVT

SEQ ID NO: 27825 - protein, 11 aa, Severe acute respiratory syndrome-related coronavirus
  REGION 1..11: note = N 283-338; Min_EDGE_Nuc_expl.; Table F
  source 1..11: note = Severe acute respiratory syndrome coronavirus 2
DQELIRQGTDY

SEQ ID NO: 27826 - protein, 9 aa, Severe acute respiratory syndrome-related coronavirus
  REGION 1..9: note = N 283-338; Min_EDGE_Nuc_expl.; Table F
  source 1..9: note = Severe acute respiratory syndrome coronavirus 2
LIRQGTDYK

SEQ ID NO: 27827 - protein, 10 aa, Severe acute respiratory syndrome-related coronavirus
  REGION 1..10: note = N 368-408; Min_EDGE_Nuc_expl.; Table F
  source 1..10: note = Severe acute respiratory syndrome coronavirus 2
KADETQALPQ

SEQ ID NO: 27828 - protein, 11 aa, Severe acute respiratory syndrome-related coronavirus
  REGION 1..11: note = N 204-239; Min_EDGE_Nuc_expl.; Table F
  source 1..11: note = Severe acute respiratory syndrome coronavirus 2
RLNQLESKMSG

SEQ ID NO: 27829 - protein, 9 aa, Severe acute respiratory syndrome-related coronavirus
  REGION 1..9: note = N 232-282; Min_EDGE_Nuc_expl.; Table F
  source 1..9: note = Severe acute respiratory syndrome coronavirus 2
VTKKSAAEA

SEQ ID NO: 27830 - protein, 8 aa, Severe acute respiratory syndrome-related coronavirus
  REGION 1..8: note = N 368-408; Min_EDGE_Nuc_expl.; Table F
  source 1..8: note = Severe acute respiratory syndrome coronavirus 2
KKQQTVTL

SEQ ID NO: 27831 - protein, 8 aa, Severe acute respiratory syndrome-related coronavirus
  REGION 1..8: note = N 368-408; Min_EDGE_Nuc_expl.; Table F
  source 1..8: note = Severe acute respiratory syndrome coronavirus 2
QALPQRQK

SEQ ID NO: 27832 - protein, 8 aa, Severe acute respiratory syndrome-related coronavirus
  REGION 1..8: note = N 232-282; Min_EDGE_Nuc_expl.; Table F
  source 1..8: note = Severe acute respiratory syndrome coronavirus 2
QGQTVTKK

SEQ ID NO: 27833 - protein, 10 aa, Severe acute respiratory syndrome-related coronavirus
  REGION 1..10: note = N 283-338; Min_EDGE_Nuc_expl.; Table F
  source 1..10: note = Severe acute respiratory syndrome coronavirus 2
FGMSRIGMEV

SEQ ID NO: 27834 - protein, 8 aa, Severe acute respiratory syndrome-related coronavirus
  REGION 1..8: note = N 345-375; Min_EDGE_Nuc_expl.; Table F
  source 1..8: note = Severe acute respiratory syndrome coronavirus 2
KTFPPTEP

SEQ ID NO: 27835 - protein, 10 aa, Severe acute respiratory syndrome-related coronavirus
  REGION 1..10: note = N 232-282; Min_EDGE_Nuc_expl.; Table F
  source 1..10: note = Severe acute respiratory syndrome coronavirus 2
YNVTQAFGRR

SEQ ID NO: 27836 - protein, 10 aa, Severe acute respiratory syndrome-related coronavirus
  REGION 1..10: note = N 283-338; Min_EDGE_Nuc_expl.; Table F
  source 1..10: note = Severe acute respiratory syndrome coronavirus 2
ELIRQGTDYK

SEQ ID NO: 27837 - protein, 11 aa, Severe acute respiratory syndrome-related coronavirus
  REGION 1..11: note = N 283-338; Min_EDGE_Nuc_expl.; Table F
  source 1..11: note = Severe acute respiratory syndrome coronavirus 2
WPQIAQFAPSA

SEQ ID NO: 27838 - protein, 11 aa, Severe acute respiratory syndrome-related coronavirus
  REGION 1..11: note = N 368-408; Min_EDGE_Nuc_expl.; Table F
  source 1..11: note = Severe acute respiratory syndrome coronavirus 2
ETQALPQRQKK

SEQ ID NO: 27839 - protein, 9 aa, Severe acute respiratory syndrome-related coronavirus
  REGION 1..9: note = ORF3a 101-152; Min_EDGE_ORF3a_expl.; Table F
  source 1..9: note = Severe acute respiratory syndrome coronavirus 2
SKNPLLYDA

SEQ ID NO: 27840 - protein, 11 aa, Severe acute respiratory syndrome-related coronavirus
  REGION 1..11: note = ORF3a 168-198; Min_EDGE_ORF3a_expl.; Table F
  source 1..11: note = Severe acute respiratory syndrome coronavirus 2
ISEHDYQIGGY

SEQ ID NO: 27841 - protein, 9 aa, Severe acute respiratory syndrome-related coronavirus
  REGION 1..9: note = ORF3a 12-55; Min_EDGE_ORF3a_expl.; Table F
  source 1..9: note = Severe acute respiratory syndrome coronavirus 2
ATPSDFVRA

SEQ ID NO: 27842 - protein, 10 aa, Severe acute respiratory syndrome-related coronavirus
  REGION 1..10: note = ORF3a 101-152; Min_EDGE_ORF3a_expl.; Table F
  source 1..10: note = Severe acute respiratory syndrome coronavirus 2
SINFVRIIMR

SEQ ID NO: 27843 - protein, 10 aa, Severe acute respiratory syndrome-related coronavirus
  REGION 1..10: note = ORF3a 52-85; Min_EDGE_ORF3a_expl.; Table F
  source 1..10: note = Severe acute respiratory syndrome coronavirus 2
SASKIITLKK

SEQ ID NO: 27844 - protein, 8 aa, Severe acute respiratory syndrome-related coronavirus
  REGION 1..8: note = ORF3a 198-254; Min_EDGE_ORF3a_expl.; Table F
  source 1..8: note = Severe acute respiratory syndrome coronavirus 2
VEHVTFFI

SEQ ID NO: 27845 - protein, 9 aa, Severe acute respiratory syndrome-related coronavirus
  REGION 1..9: note = ORF3a 12-55; Min_EDGE_ORF3a_expl.; Table F
  source 1..9: note = Severe acute respiratory syndrome coronavirus 2
IPIQASLPF

SEQ ID NO: 27846 - protein, 11 aa, Severe acute respiratory syndrome-related coronavirus
  REGION 1..11: note = ORF3a 12-55; Min_EDGE_ORF3a_expl.; Table F
  source 1..11: note = Severe acute respiratory syndrome coronavirus 2
SLPFGWLIVGV

SEQ ID NO: 27847 - protein, 9 aa, Severe acute respiratory syndrome-related coronavirus
  REGION 1..9: note = ORF3a 52-85; Min_EDGE_ORF3a_expl.; Table F
  source 1..9: note = Severe acute respiratory syndrome coronavirus 2
LALSKGVHF

SEQ ID NO: 27848 - protein, 8 aa, Severe acute respiratory syndrome-related coronavirus
  REGION 1..8: note = ORF3a 198-254; Min_EDGE_ORF3a_expl.; Table F
  source 1..8: note = Severe acute respiratory syndrome coronavirus 2
TGVEHVTF

SEQ ID NO: 27849 - protein, 10 aa, Severe acute respiratory syndrome-related coronavirus
  REGION 1..10: note = ORF3a 101-152; Min_EDGE_ORF3a_expl.; Table F
  source 1..10: note = Severe acute respiratory syndrome coronavirus 2
FLQSINFVRI

SEQ ID NO: 27850 - protein, 8 aa, Severe acute respiratory syndrome-related coronavirus
  REGION 1..8: note = ORF3a 101-152; Min_EDGE_ORF3a_expl.; Table F
  source 1..8: note = Severe acute respiratory syndrome coronavirus 2
YFLQSINF

SEQ ID NO: 27851 - protein, 10 aa, Severe acute respiratory syndrome-related coronavirus
  REGION 1..10: note = ORF3a 198-254; Min_EDGE_ORF3a_expl.; Table F
  source 1..10: note = Severe acute respiratory syndrome coronavirus 2
SYFTSDYYQL

SEQ ID NO: 27852 - protein, 10 aa, Severe acute respiratory syndrome-related coronavirus
  REGION 1..10: note = ORF3a 198-254; Min_EDGE_ORF3a_expl.; Table F
  source 1..10: note = Severe acute respiratory syndrome coronavirus 2
KIVDEPEEHV

SEQ ID NO: 27853 - protein, 10 aa, Severe acute respiratory syndrome-related coronavirus
  REGION 1..10: note = ORF3a 198-254; Min_EDGE_ORF3a_expl.; Table F
  source 1..10: note = Severe acute respiratory syndrome coronavirus 2
LHSYFTSDYY

SEQ ID NO: 27854 - protein, 9 aa, Severe acute respiratory syndrome-related coronavirus
  REGION 1..9: note = ORF3a 168-198; Min_EDGE_ORF3a_expl.; Table F
  source 1..9: note = Severe acute respiratory syndrome coronavirus 2
YQIGGYTEK

SEQ ID NO: 27855 - protein, 9 aa, Severe acute respiratory syndrome-related coronavirus
  REGION 1..9: note = ORF3a 12-55; Min_EDGE_ORF3a_expl.; Table F
  source 1..9: note = Severe acute respiratory syndrome coronavirus 2
IQASLPFGW

SEQ ID NO: 27856 - protein, 9 aa, Severe acute respiratory syndrome-related coronavirus
  REGION 1..9: note = ORF3a 12-55; Min_EDGE_ORF3a_expl.; Table F
  source 1..9: note = Severe acute respiratory syndrome coronavirus 2
SDFVRATAT

SEQ ID NO: 27857 - protein, 9 aa, Severe acute respiratory syndrome-related coronavirus
  REGION 1..9: note = ORF3a 52-85; Min_EDGE_ORF3a_expl.; Table F
  source 1..9: note = Severe acute respiratory syndrome coronavirus 2
KIITLKKRW

SEQ ID NO: 27858 - protein, 9 aa, Severe acute respiratory syndrome-related coronavirus
  REGION 1..9: note = ORF3a 101-152; Min_EDGE_ORF3a_expl.; Table F
  source 1..9: note = Severe acute respiratory syndrome coronavirus 2
LQSINFVRI

SEQ ID NO: 27859 - protein, 9 aa, Severe acute respiratory syndrome-related coronavirus
  REGION 1..9: note = ORF3a 12-55; Min_EDGE_ORF3a_expl.; Table F
  source 1..9: note = Severe acute respiratory syndrome coronavirus 2
ASLPFGWLI

SEQ ID NO: 27860 - protein, 8 aa, Severe acute respiratory syndrome-related coronavirus
  REGION 1..8: note = ORF3a 198-254; Min_EDGE_ORF3a_expl.; Table F
  source 1..8: note = Severe acute respiratory syndrome coronavirus 2
YQLYSTQL

SEQ ID NO: 27861 - protein, 9 aa, Severe acute respiratory syndrome-related coronavirus
  REGION 1..9: note = ORF3a 101-152; Min_EDGE_ORF3a_expl.; Table F
  source 1..9: note = Severe acute respiratory syndrome coronavirus 2
CRSKNPLLY

SEQ ID NO: 27862 - protein, 11 aa, Severe acute respiratory syndrome-related coronavirus
  REGION 1..11: note = ORF3a 198-254; Min_EDGE_ORF3a_expl.; Table F
  source 1..11: note = Severe acute respiratory syndrome coronavirus 2
VLHSYFTSDYY

SEQ ID NO: 27863 - protein, 11 aa, Severe acute respiratory syndrome-related coronavirus
  REGION 1..11: note = ORF3a 52-85; Min_EDGE_ORF3a_expl.; Table F
  source 1..11: note = Severe acute respiratory syndrome coronavirus 2
KIITLKKRWQL

SEQ ID NO: 27864 - protein, 9 aa, Severe acute respiratory syndrome-related coronavirus
  REGION 1..9: note = ORF3a 198-254; Min_EDGE_ORF3a_expl.; Table F
  source 1..9: note = Severe acute respiratory syndrome coronavirus 2
EPEEHVQIH

SEQ ID NO: 27865 - protein, 8 aa, Severe acute respiratory syndrome-related coronavirus
  REGION 1..8: note = ORF3a 12-55; Min_EDGE_ORF3a_expl.; Table F
  source 1..8: note = Severe acute respiratory syndrome coronavirus 2
TATIPIQA

SEQ ID NO: 27866 - protein, 9 aa, Severe acute respiratory syndrome-related coronavirus
  REGION 1..9: note = ORF3a 168-198; Min_EDGE_ORF3a_expl.; Table F
  source 1..9: note = Severe acute respiratory syndrome coronavirus 2
PISEHDYQI

SEQ ID NO: 27867 - protein, 10 aa, Severe acute respiratory syndrome-related coronavirus
  REGION 1..10: note = ORF3a 12-55; Min_EDGE_ORF3a_expl.; Table F
  source 1..10: note = Severe acute respiratory syndrome coronavirus 2
RATATIPIQA

SEQ ID NO: 27868 - protein, 8 aa, Severe acute respiratory syndrome-related coronavirus
  REGION 1..8: note = ORF3a 12-55; Min_EDGE_ORF3a_expl.; Table F
  source 1..8: note = Severe acute respiratory syndrome coronavirus 2
SDFVRATA

SEQ ID NO: 27869 - protein, 9 aa, Severe acute respiratory syndrome-related coronavirus
  REGION 1..9: note = ORF3a 198-254; Min_EDGE_ORF3a_expl.; Table F
  source 1..9: note = Severe acute respiratory syndrome coronavirus 2
VEHVTFFIY

SEQ ID NO: 27870 - protein, 9 aa, Severe acute respiratory syndrome-related coronavirus
  REGION 1..9: note = ORF3a 12-55; Min_EDGE_ORF3a_expl.; Table F
  source 1..9: note = Severe acute respiratory syndrome coronavirus 2
IKDATPSDF

SEQ ID NO: 27871 - protein, 9 aa, Severe acute respiratory syndrome-related coronavirus
  REGION 1..9: note = ORF3a 101-152; Min_EDGE_ORF3a_expl.; Table F
  source 1..9: note = Severe acute respiratory syndrome coronavirus 2
YFLQSINFV

SEQ ID NO: 27872 - protein, 8 aa, Severe acute respiratory syndrome-related coronavirus
  REGION 1..8: note = ORF3a 101-152; Min_EDGE_ORF3a_expl.; Table F
  source 1..8: note = Severe acute respiratory syndrome coronavirus 2
QSINFVRI

SEQ ID NO: 27873 - protein, 10 aa, Severe acute respiratory syndrome-related coronavirus
  REGION 1..10: note = ORF3a 101-152; Min_EDGE_ORF3a_expl.; Table F
  source 1..10: note = Severe acute respiratory syndrome coronavirus 2
KNPLLYDANY

SEQ ID NO: 27874 - protein, 8 aa, Severe acute respiratory syndrome-related coronavirus
  REGION 1..8: note = ORF3a 12-55; Min_EDGE_ORF3a_expl.; Table F
  source 1..8: note = Severe acute respiratory syndrome coronavirus 2
GEIKDATP

SEQ ID NO: 27875 - protein, 11 aa, Severe acute respiratory syndrome-related coronavirus
  REGION 1..11: note = ORF3a 12-55; Min_EDGE_ORF3a_expl.; Table F
  source 1..11: note = Severe acute respiratory syndrome coronavirus 2
LPFGWLIVGVA

SEQ ID NO: 27876 - protein, 11 aa, Severe acute respiratory syndrome-related coronavirus
  REGION 1..11: note = ORF3a 168-198; Min_EDGE_ORF3a_expl.; Table F
  source 1..11: note = Severe acute respiratory syndrome coronavirus 2
HDYQIGGYTEK

SEQ ID NO: 27877 - protein, 9 aa, Severe acute respiratory syndrome-related coronavirus
  REGION 1..9: note = ORF3a 12-55; Min_EDGE_ORF3a_expl.; Table F
  source 1..9: note = Severe acute respiratory syndrome coronavirus 2
DFVRATATI

SEQ ID NO: 27878 - protein, 8 aa, Severe acute respiratory syndrome-related coronavirus
  REGION 1..8: note = ORF3a 101-152; Min_EDGE_ORF3a_expl.; Table F
  source 1..8: note = Severe acute respiratory syndrome coronavirus 2
FLQSINFV

SEQ ID NO: 27879 - protein, 11 aa, Severe acute respiratory syndrome-related coronavirus
  REGION 1..11: note = ORF3a 101-152; Min_EDGE_ORF3a_expl.; Table F
  source 1..11: note = Severe acute respiratory syndrome coronavirus 2
YFLQSINFVRI

SEQ ID NO: 27880 - protein, 9 aa, Severe acute respiratory syndrome-related coronavirus
  REGION 1..9: note = ORF3a 198-254; Min_EDGE_ORF3a_expl.; Table F
  source 1..9: note = Severe acute respiratory syndrome coronavirus 2
DTGVEHVTF

SEQ ID NO: 27881 - protein, 9 aa, Severe acute respiratory syndrome-related coronavirus
  REGION 1..9: note = ORF3a 198-254; Min_EDGE_ORF3a_expl.; Table F
  source 1..9: note = Severe acute respiratory syndrome coronavirus 2
QLYSTQLST

SEQ ID NO: 27882 - protein, 8 aa, Severe acute respiratory syndrome-related coronavirus
  REGION 1..8: note = ORF3a 101-152; Min_EDGE_ORF3a_expl.; Table F
  source 1..8: note = Severe acute respiratory syndrome coronavirus 2
SINFVRII

SEQ ID NO: 27883 - protein, 11 aa, Severe acute respiratory syndrome-related coronavirus
  REGION 1..11: note = ORF3a 168-198; Min_EDGE_ORF3a_expl.; Table F
  source 1..11: note = Severe acute respiratory syndrome coronavirus 2
TTSPISEHDYQ

SEQ ID NO: 27884 - protein, 8 aa, Severe acute respiratory syndrome-related coronavirus
  REGION 1..8: note = ORF3a 12-55; Min_EDGE_ORF3a_expl.; Table F
  source 1..8: note = Severe acute respiratory syndrome coronavirus 2
DATPSDFV

SEQ ID NO: 27885 - protein, 8 aa, Severe acute respiratory syndrome-related coronavirus
  REGION 1..8: note = ORF3a 12-55; Min_EDGE_ORF3a_expl.; Table F
  source 1..8: note = Severe acute respiratory syndrome coronavirus 2
FGWLIVGV

SEQ ID NO: 27886 - protein, 9 aa, Severe acute respiratory syndrome-related coronavirus
  REGION 1..9: note = ORF3a 168-198; Min_EDGE_ORF3a_expl.; Table F
  source 1..9: note = Severe acute respiratory syndrome coronavirus 2
GTTSPISEH

SEQ ID NO: 27887 - protein, 11 aa, Severe acute respiratory syndrome-related coronavirus
  REGION 1..11: note = ORF3a 12-55; Min_EDGE_ORF3a_expl.; Table F
  source 1..11: note = Severe acute respiratory syndrome coronavirus 2
TPSDFVRATAT

SEQ ID NO: 27888 - protein, 10 aa, Severe acute respiratory syndrome-related coronavirus
  REGION 1..10: note = ORF3a 198-254; Min_EDGE_ORF3a_expl.; Table F
  source 1..10: note = Severe acute respiratory syndrome coronavirus 2
DYYQLYSTQL

SEQ ID NO: 27889 - protein, 9 aa, Severe acute respiratory syndrome-related coronavirus
  REGION 1..9: note = ORF3a 198-254; Min_EDGE_ORF3a_expl.; Table F
  source 1..9: note = Severe acute respiratory syndrome coronavirus 2
LSTDTGVEH

SEQ ID NO: 27890 - protein, 11 aa, Severe acute respiratory syndrome-related coronavirus
  REGION 1..11: note = ORF3a 198-254; Min_EDGE_ORF3a_expl.; Table F
  source 1..11: note = Severe acute respiratory syndrome coronavirus 2
EHVTFFIYNKI

SEQ ID NO: 27891 - protein, 9 aa, Severe acute respiratory syndrome-related coronavirus
  REGION 1..9: note = ORF3a 12-55; Min_EDGE_ORF3a_expl.; Table F
  source 1..9: note = Severe acute respiratory syndrome coronavirus 2
GEIKDATPS

SEQ ID NO: 27892 - protein, 8 aa, Severe acute respiratory syndrome-related coronavirus
  REGION 1..8: note = ORF3a 12-55; Min_EDGE_ORF3a_expl.; Table F
  source 1..8: note = Severe acute respiratory syndrome coronavirus 2
QASLPFGW

SEQ ID NO: 27893 - protein, 9 aa, Severe acute respiratory syndrome-related coronavirus
  REGION 1..9: note = ORF3a 101-152; Min_EDGE_ORF3a_expl.; Table F
  source 1..9: note = Severe acute respiratory syndrome coronavirus 2
FLYLYALVY

SEQ ID NO: 27894 - protein, 8 aa, Severe acute respiratory syndrome-related coronavirus
  REGION 1..8: note = ORF3a 101-152; Min_EDGE_ORF3a_expl.; Table F
  source 1..8: note = Severe acute respiratory syndrome coronavirus 2
LYLYALVY

SEQ ID NO: 27895 - protein, 9 aa, Severe acute respiratory syndrome-related coronavirus
  REGION 1..9: note = ORF3a 52-85; Min_EDGE_ORF3a_expl.; Table F
  source 1..9: note = Severe acute respiratory syndrome coronavirus 2
WQLALSKGV

SEQ ID NO: 27896 - protein, 8 aa, Severe acute respiratory syndrome-related coronavirus
  REGION 1..8: note = ORF3a 168-198; Min_EDGE_ORF3a_expl.; Table F
  source 1..8: note = Severe acute respiratory syndrome coronavirus 2
SPISEHDY

SEQ ID NO: 27897 - protein, 8 aa, Severe acute respiratory syndrome-related coronavirus
  REGION 1..8: note = ORF3a 168-198; Min_EDGE_ORF3a_expl.; Table F
  source 1..8: note = Severe acute respiratory syndrome coronavirus 2
HDYQIGGY

SEQ ID NO: 27898 - protein, 10 aa, Severe acute respiratory syndrome-related coronavirus
  REGION 1..10: note = ORF3a 12-55; Min_EDGE_ORF3a_expl.; Table F
  source 1..10: note = Severe acute respiratory syndrome coronavirus 2
DATPSDFVRA

SEQ ID NO: 27899 - protein, 11 aa, Severe acute respiratory syndrome-related coronavirus
  REGION 1..11: note = ORF3a 101-152; Min_EDGE_ORF3a_expl.; Table F
  source 1..11: note = Severe acute respiratory syndrome coronavirus 2
QSINFVRIIMR

SEQ ID NO: 27900 - protein, 8 aa, Severe acute respiratory syndrome-related coronavirus
  REGION 1..8: note = ORF3a 101-152; Min_EDGE_ORF3a_expl.; Table F
  source 1..8: note = Severe acute respiratory syndrome coronavirus 2
LYDANYFL

SEQ ID NO: 27901 - protein, 10 aa, Severe acute respiratory syndrome-related coronavirus
  REGION 1..10: note = ORF3a 168-198; Min_EDGE_ORF3a_expl.; Table F
  source 1..10: note = Severe acute respiratory syndrome coronavirus 2
EHDYQIGGYT

SEQ ID NO: 27902 - protein, 10 aa, Severe acute respiratory syndrome-related coronavirus
  REGION 1..10: note = ORF3a 168-198; Min_EDGE_ORF3a_expl.; Table F
  source 1..10: note = Severe acute respiratory syndrome coronavirus 2
DYQIGGYTEK

SEQ ID NO: 27903 - protein, 10 aa, Severe acute respiratory syndrome-related coronavirus
  REGION 1..10: note = ORF3a 198-254; Min_EDGE_ORF3a_expl.; Table F
  source 1..10: note = Severe acute respiratory syndrome coronavirus 2
LSTDTGVEHV

SEQ ID NO: 27904 - protein, 8 aa, Severe acute respiratory syndrome-related coronavirus
  REGION 1..8: note = ORF3a 198-254; Min_EDGE_ORF3a_expl.; Table F
  source 1..8: note = Severe acute respiratory syndrome coronavirus 2
EHVTFFIY

SEQ ID NO: 27905 - protein, 9 aa, Severe acute respiratory syndrome-related coronavirus
  REGION 1..9: note = ORF3a 198-254; Min_EDGE_ORF3a_expl.; Table F
  source 1..9: note = Severe acute respiratory syndrome coronavirus 2
DEPEEHVQI

SEQ ID NO: 27906 - protein, 8 aa, Severe acute respiratory syndrome-related coronavirus
  REGION 1..8: note = ORF3a 52-85; Min_EDGE_ORF3a_expl.; Table F
  source 1..8: note = Severe acute respiratory syndrome coronavirus 2
ASKIITLK

SEQ ID NO: 27907 - protein, 9 aa, Severe acute respiratory syndrome-related coronavirus
  REGION 1..9: note = ORF3a 12-55; Min_EDGE_ORF3a_expl.; Table F
  source 1..9: note = Severe acute respiratory syndrome coronavirus 2
LPFGWLIVG

SEQ ID NO: 27908 - protein, 9 aa, Severe acute respiratory syndrome-related coronavirus
  REGION 1..9: note = ORF3a 168-198; Min_EDGE_ORF3a_expl.; Table F
  source 1..9: note = Severe acute respiratory syndrome coronavirus 2
TSPISEHDY

SEQ ID NO: 27909 - protein, 8 aa, Severe acute respiratory syndrome-related coronavirus
  REGION 1..8: note = ORF3a 198-254; Min_EDGE_ORF3a_expl.; Table F
  source 1..8: note = Severe acute respiratory syndrome coronavirus 2
VTFFIYNK

SEQ ID NO: 27910 - protein, 8 aa, Severe acute respiratory syndrome-related coronavirus
  REGION 1..8: note = ORF3a 12-55; Min_EDGE_ORF3a_expl.; Table F
  source 1..8: note = Severe acute respiratory syndrome coronavirus 2
FVRATATI

SEQ ID NO: 27911 - protein, 9 aa, Severe acute respiratory syndrome-related coronavirus
  REGION 1..9: note = Min_Sette; Table F
  source 1..9: note = Severe acute respiratory syndrome coronavirus 2
LPNNTASWF

SEQ ID NO: 27912 - protein, 13 aa, Severe acute respiratory syndrome-related coronavirus
  REGION 1..13: note = Min_Sette; Table F
  source 1..13: note = Severe acute respiratory syndrome coronavirus 2
NTNSSPDDQIGYY

SEQ ID NO: 27913 - protein, 9 aa, Severe acute respiratory syndrome-related coronavirus
  REGION 1..9: note = Min_Sette; Table F
  source 1..9: note = Severe acute respiratory syndrome coronavirus 2
SPDDQIGYY

SEQ ID NO: 27914 - protein, 9 aa, Severe acute respiratory syndrome-related coronavirus
  REGION 1..9: note = Min_Sette; Table F
  source 1..9: note = Severe acute respiratory syndrome coronavirus 2
GTRNPANNA

SEQ ID NO: 27915 - protein, 9 aa, Severe acute respiratory syndrome-related coronavirus
  REGION 1..9: note = Min_Sette; Table F
  source 1..9: note = Severe acute respiratory syndrome coronavirus 2
KSAAEASKK

SEQ ID NO: 27916 - protein, 9 aa, Severe acute respiratory syndrome-related coronavirus
  REGION 1..9: note = Min_Sette; Table F
  source 1..9: note = Severe acute respiratory syndrome coronavirus 2
KAYNVTQAF

SEQ ID NO: 27917 - protein, 10 aa, Severe acute respiratory syndrome-related coronavirus
  REGION 1..10: note = Min_Sette; Table F
  source 1..10: note = Severe acute respiratory syndrome coronavirus 2
QELIRQGTDY

SEQ ID NO: 27918 - protein, 9 aa, Severe acute respiratory syndrome-related coronavirus
  REGION 1..9: note = Min_Sette; Table F
  source 1..9: note = Severe acute respiratory syndrome coronavirus 2
ELIRQGTDY

SEQ ID NO: 27919 - protein, 10 aa, Severe acute respiratory syndrome-related coronavirus
  REGION 1..10: note = Min_Sette; Table F
  source 1..10: note = Severe acute respiratory syndrome coronavirus 2
QFAPSASAFF

SEQ ID NO: 27920 - protein, 9 aa, Severe acute respiratory syndrome-related coronavirus
  REGION 1..9: note = Min_Sette; Table F
  source 1..9: note = Severe acute respiratory syndrome coronavirus 2
FAPSASAFF

SEQ ID NO: 27921 - protein, 10 aa, Severe acute respiratory syndrome-related coronavirus
  REGION 1..10: note = Min_Sette; Table F
  source 1..10: note = Severe acute respiratory syndrome coronavirus 2
APSASAFFGM

SEQ ID NO: 27922 - protein, 10 aa, Severe acute respiratory syndrome-related coronavirus
  REGION 1..10: note = Min_Sette; Table F
  source 1..10: note = Severe acute respiratory syndrome coronavirus 2
SASAFFGMSR

SEQ ID NO: 27923 - protein, 11 aa, Severe acute respiratory syndrome-related coronavirus
  REGION 1..11: note = Min_Sette; Table F
  source 1..11: note = Severe acute respiratory syndrome coronavirus 2
EVTPSGTWLTY

SEQ ID NO: 27924 - protein, 10 aa, Severe acute respiratory syndrome-related coronavirus
  REGION 1..10: note = Min_Sette; Table F
  source 1..10: note = Severe acute respiratory syndrome coronavirus 2
VTPSGTWLTY

SEQ ID NO: 27925 - protein, 9 aa, Severe acute respiratory syndrome-related coronavirus
  REGION 1..9: note = Min_Sette; Table F
  source 1..9: note = Severe acute respiratory syndrome coronavirus 2
TPSGTWLTY

SEQ ID NO: 27926 - protein, 10 aa, Severe acute respiratory syndrome-related coronavirus
  REGION 1..10: note = Min_Sette; Table F
  source 1..10: note = Severe acute respiratory syndrome coronavirus 2
YKTFPPTEPK

SEQ ID NO: 27927 - protein, 9 aa, Severe acute respiratory syndrome-related coronavirus
  REGION 1..9: note = Min_Sette; Table F
  source 1..9: note = Severe acute respiratory syndrome coronavirus 2
LPAADLDDF

SEQ ID NO: 27928 - protein, 9 aa, Severe acute respiratory syndrome-related coronavirus
  REGION 1..9: note = Min_Sette; Table F
  source 1..9: note = Severe acute respiratory syndrome coronavirus 2
ATIPIQASL

SEQ ID NO: 27929 - protein, 9 aa, Severe acute respiratory syndrome-related coronavirus
  REGION 1..9: note = Min_Sette; Table F
  source 1..9: note = Severe acute respiratory syndrome coronavirus 2
IPIQASLPF

SEQ ID NO: 27930 - protein, 8 aa, Severe acute respiratory syndrome-related coronavirus
  REGION 1..8: note = Min_Sette; Table F
  source 1..8: note = Severe acute respiratory syndrome coronavirus 2
LPFGWLIV

SEQ ID NO: 27931 - protein, 9 aa, Severe acute respiratory syndrome-related coronavirus
  REGION 1..9: note = Min_Sette; Table F
  source 1..9: note = Severe acute respiratory syndrome coronavirus 2
QSASKIITL

SEQ ID NO: 27932 - protein, 12 aa, Severe acute respiratory syndrome-related coronavirus
  REGION 1..12: note = Min_Sette; Table F
  source 1..12: note = Severe acute respiratory syndrome coronavirus 2
SASKIITLKKRW

SEQ ID NO: 27933 - protein, 9 aa, Severe acute respiratory syndrome-related coronavirus
  REGION 1..9: note = Min_Sette; Table F
  source 1..9: note = Severe acute respiratory syndrome coronavirus 2
ITLKKRWQL

SEQ ID NO: 27934 - protein, 9 aa, Severe acute respiratory syndrome-related coronavirus
  REGION 1..9: note = Min_Sette; Table F
  source 1..9: note = Severe acute respiratory syndrome coronavirus 2
LYLYALVYF

SEQ ID NO: 27935 - protein, 9 aa, Severe acute respiratory syndrome-related coronavirus
  REGION 1..9: note = Min_Sette; Table F
  source 1..9: note = Severe acute respiratory syndrome coronavirus 2
FVRIIMRLW

SEQ ID NO: 27936 - protein, 9 aa, Severe acute respiratory syndrome-related coronavirus
  REGION 1..9: note = Min_Sette; Table F
  source 1..9: note = Severe acute respiratory syndrome coronavirus 2
NPLLYDANY

SEQ ID NO: 27937 - protein, 9 aa, Severe acute respiratory syndrome-related coronavirus
  REGION 1..9: note = Min_Sette; Table F
  source 1..9: note = Severe acute respiratory syndrome coronavirus 2
HSYFTSDYY

SEQ ID NO: 27938 - protein, 10 aa, Severe acute respiratory syndrome-related coronavirus
  REGION 1..10: note = Min_Sette; Table F
  source 1..10: note = Severe acute respiratory syndrome coronavirus 2
YFTSDYYQLY

SEQ ID NO: 27939 - protein, 9 aa, Severe acute respiratory syndrome-related coronavirus
  REGION 1..9: note = Min_Sette; Table F
  source 1..9: note = Severe acute respiratory syndrome coronavirus 2
HVTFFIYNK

SEQ ID NO: 27940 - RNA, 80 nt, synthetic construct
  misc_feature 1..80: note = Description of Artificial Sequence: Synthetic oligonucleotide
  misc_feature 1..80: note = See specification as filed for detailed description of substitutions and preferred embodiments
  source 1..80: mol_type = other RNA
aaaaaaaaaaaaaaaaaaaaaaaaaaaaaaaaaaaaaaaaaaaaaaaaaaaaaaaaaaaaaaaaaaaaaaaaaaaaaaaa

SEQ ID NO: 27941 - protein, 10 aa, synthetic construct
  REGION 1..10: note = Description of Artificial Sequence: Synthetic peptide
  REGION 1..10: note = This sequence may encompass 2-10 residues
GGGGGGGGGG

SEQ ID NO: 27942 - protein, 10 aa, synthetic construct
  REGION 1..10: note = Description of Artificial Sequence: Synthetic peptide
  REGION 1..10: note = This sequence may encompass 2-10 residues
AAAAAAAAAA

SEQ ID NO: 27943 - RNA, 90 nt, synthetic construct
  misc_feature 1..90: note = Description of Artificial Sequence: Synthetic oligonucleotide
  misc_feature 1..90: note = This sequence may encompass 20-90 nucleotides
  source 1..90: mol_type = other RNA
aaaaaaaaaaaaaaaaaaaaaaaaaaaaaaaaaaaaaaaaaaaaaaaaaaaaaaaaaaaaaaaaaaaaaaaaaaaaaaaaaaaaaaaaaa

SEQ ID NO: 27944 - protein, 23 aa, Severe acute respiratory syndrome-related coronavirus
  source 1..23: note = Severe acute respiratory syndrome coronavirus 2
HIDAYKTFPPTEPKKDKKKKADE

SEQ ID NO: 27945 - protein, 17 aa, Severe acute respiratory syndrome-related coronavirus
  source 1..17: note = Severe acute respiratory syndrome coronavirus 2
CRSKNPLLYDANYFLCW

SEQ ID NO: 27946 - protein, 29 aa, Severe acute respiratory syndrome-related coronavirus
  source 1..29: note = Severe acute respiratory syndrome coronavirus 2
FEYYHTTDPSFLGRYMSALNHTKKWKYPQ

SEQ ID NO: 27947 - protein, 18 aa, Severe acute respiratory syndrome-related coronavirus
  source 1..18: note = Severe acute respiratory syndrome coronavirus 2
ISNEKQEILGTVSWNLRE

SEQ ID NO: 27948 - protein, 44 aa, Severe acute respiratory syndrome-related coronavirus
  source 1..44: note = Severe acute respiratory syndrome coronavirus 2
DIKDLPKEITVATSRTLSYYKLGASQRVAGDSGFAAYSRYRIGN

SEQ ID NO: 27949 - protein, 24 aa, Severe acute respiratory syndrome-related coronavirus
  source 1..24: note = Severe acute respiratory syndrome coronavirus 2
VRATATIPIQASLPFGWLIVGVAL

SEQ ID NO: 27950 - protein, 24 aa, Severe acute respiratory syndrome-related coronavirus
  source 1..24: note = Severe acute respiratory syndrome coronavirus 2
YLTFYLTNDVSFLAHIQWMVMFTP

SEQ ID NO: 27951 - protein, 21 aa, Severe acute respiratory syndrome-related coronavirus
  source 1..21: note = Severe acute respiratory syndrome coronavirus 2
GLMWLSYFIASFRLFARTRSM

SEQ ID NO: 27952 - protein, 19 aa, Severe acute respiratory syndrome-related coronavirus
  source 1..19: note = Severe acute respiratory syndrome coronavirus 2
DWYDFVENPDILRVYANLG

SEQ ID NO: 27953 - protein, 17 aa, Severe acute respiratory syndrome-related coronavirus
  source 1..17: note = Severe acute respiratory syndrome coronavirus 2
PYPNASFDNFKFVCDNI

SEQ ID NO: 27954 - protein, 21 aa, Severe acute respiratory syndrome-related coronavirus
  source 1..21: note = Severe acute respiratory syndrome coronavirus 2
NFNKDFYDFAVSKGFFKEGSS

SEQ ID NO: 27955 - protein, 18 aa, Severe acute respiratory syndrome-related coronavirus
  source 1..18: note = Severe acute respiratory syndrome coronavirus 2
DGVPFVVSTGYHFRELGV

SEQ ID NO: 27956 - protein, 27 aa, Severe acute respiratory syndrome-related coronavirus
  source 1..27: note = Severe acute respiratory syndrome coronavirus 2
ACPLIAAVITREVGFVVPGLPGTILRT

SEQ ID NO: 27957 - protein, 17 aa, Severe acute respiratory syndrome-related coronavirus
  source 1..17: note = Severe acute respiratory syndrome coronavirus 2
ATTRQVVNVVTTKIALK

SEQ ID NO: 27958 - protein, 20 aa, Severe acute respiratory syndrome-related coronavirus
  source 1..20: note = Severe acute respiratory syndrome coronavirus 2
SRIGMEVTPSGTWLTYTGAI

SEQ ID NO: 27959 - protein, 17 aa, Severe acute respiratory syndrome-related coronavirus
  source 1..17: note = Severe acute respiratory syndrome coronavirus 2
TLACFVLAAVYRINWIT

SEQ ID NO: 27960 - protein, 22 aa, Severe acute respiratory syndrome-related coronavirus
  source 1..22: note = Severe acute respiratory syndrome coronavirus 2
GGDGKMKDLSPRWYFYYLGTGP

SEQ ID NO: 27961 - protein, 27 aa, Severe acute respiratory syndrome-related coronavirus
  source 1..27: note = Severe acute respiratory syndrome coronavirus 2
GPLVRKIFVDGVPFVVSTGYHFRELGV

SEQ ID NO: 27962 - protein, 39 aa, Severe acute respiratory syndrome-related coronavirus
  source 1..39: note = Severe acute respiratory syndrome coronavirus 2
PVYSFLPGVYSVIYLYLTFYLTNDVSFLAHIQWMVMFTP

SEQ ID NO: 27963 - protein, 18 aa, Severe acute respiratory syndrome-related coronavirus
  source 1..18: note = Severe acute respiratory syndrome coronavirus 2
NNLDKSAGFPFNKWGKAR

SEQ ID NO: 27964 - protein, 19 aa, Severe acute respiratory syndrome-related coronavirus
  source 1..19: note = Severe acute respiratory syndrome coronavirus 2
TLACFVLAAVYRINWITGG

SEQ ID NO: 27965 - protein, 17 aa, Severe acute respiratory syndrome-related coronavirus
  source 1..17: note = Severe acute respiratory syndrome coronavirus 2
TYNKVENMTPRDLGACI

SEQ ID NO: 27966 - protein, 22 aa, Severe acute respiratory syndrome-related coronavirus
  source 1..22: note = Severe acute respiratory syndrome coronavirus 2
KQGDDYVYLPYPDPSRILGAGC

SEQ ID NO: 27967 - protein, 26 aa, Severe acute respiratory syndrome-related coronavirus
  source 1..26: note = Severe acute respiratory syndrome coronavirus 2
SLATVAYFNMVYMPASWVMRIMTWLD

SEQ ID NO: 27968 - protein, 17 aa, Severe acute respiratory syndrome-related coronavirus
  source 1..17: note = Severe acute respiratory syndrome coronavirus 2
GNCDTLKEILVTYNCCD

SEQ ID NO: 27969 - protein, 31 aa, Severe acute respiratory syndrome-related coronavirus
  source 1..31: note = Severe acute respiratory syndrome coronavirus 2
EAFEYYHTTDPSFLGRYMSALNHTKKWKYPQ

SEQ ID NO: 27970 - protein, 37 aa, Severe acute respiratory syndrome-related coronavirus
  source 1..37: note = Severe acute respiratory syndrome coronavirus 2
WPQIAQFAPSASAFFGMSRIGMEVTPSGTWLTYTGAI

SEQ ID NO: 27971 - protein, 60 aa, Severe acute respiratory syndrome-related coronavirus
  source 1..60: note = Severe acute respiratory syndrome coronavirus 2
ACPLIAAVITREVGFVVPGLPGTILRTTNGDFLHFLPRVFSAVGNICYTPSKLIEYTDFA

SEQ ID NO: 27972 - protein, 31 aa, Severe acute respiratory syndrome-related coronavirus
  source 1..31: note = Severe acute respiratory syndrome coronavirus 2
NVAFQTVKPGNFNKDFYDFAVSKGFFKEGSS

SEQ ID NO: 27973 - protein, 22 aa, Severe acute respiratory syndrome-related coronavirus
  source 1..22: note = Severe acute respiratory syndrome coronavirus 2
GASQRVAGDSGFAAYSRYRIGN

SEQ ID NO: 27974 - DNA, 20 bp, synthetic construct
  source 1..20: mol_type = other DNA
ctacggctaacctgaatgga

SEQ ID NO: 27975 - DNA, 25 bp, synthetic construct
  source 1..25: mol_type = other DNA
ctacgacatagtctagtccgccaag

SEQ ID NO: 27976 - DNA, 18 bp, synthetic construct
  source 1..18: mol_type = other DNA
atagtctagtccgccaag

SEQ ID NO: 27977 - DNA, 83 bp, synthetic construct
  source 1..83: mol_type = other DNA
acttccatcatagttatggccatgactactctagctagcagtgttaaatcattcagctacctgagaggggcccctataactct

SEQ ID NO: 27978 - DNA, 25 bp, synthetic construct
  source 1..25: mol_type = other DNA
acctgagaggggcccctataactct

SEQ ID NO: 27979 - DNA, 16 bp, synthetic construct
  source 1..16: mol_type = other DNA
gggcccctataactct

SEQ ID NO: 27980 - DNA, 61 bp, synthetic construct
  source 1..61: mol_type = other DNA
gggcccctataactctctacggctaacctgaatggactacgacatagtctagtccgccaag

SEQ ID NO: 27981 - DNA, 43 bp, synthetic construct
  source 1..43: mol_type = other DNA
gggcccctataactctctacggctaacctgaatggactacgac

SEQ ID NO: 27982 - DNA, 16 bp, synthetic construct
  source 1..16: mol_type = other DNA
agtctagtccgccaag

SEQ ID NO: 27983 - DNA, 29 bp, synthetic construct
  source 1..29: mol_type = other DNA
ctacggctaacctgaatggactacgacat

SEQ ID NO: 27984 - DNA, 33 bp, synthetic construct
  source 1..33: mol_type = other DNA
ctctctacggctaacctgaatggactacgacat

SEQ ID NO: 27985 - DNA, 45 bp, synthetic construct
  source 1..45: mol_type = other DNA
ctacggctaacctgaatggactacgacatagtctagtccgccaag

SEQ ID NO: 27986 - DNA, 49 bp, synthetic construct
  source 1..49: mol_type = other DNA
ctctctacggctaacctgaatggactacgacatagtctagtccgccaag

SEQ ID NO: 27987 - DNA, 27 bp, synthetic construct
  source 1..27: mol_type = other DNA
ctacggctaacctgaatggactacgac

SEQ ID NO: 27988 - DNA, 31 bp, synthetic construct
  source 1..31: mol_type = other DNA
ctctctacggctaacctgaatggactacgac

SEQ ID NO: 27989 - DNA, 24 bp, synthetic construct
  source 1..24: mol_type = other DNA
ctctctacggctaacctgaatgga

SEQ ID NO: 27990 - DNA, 17 bp, synthetic construct
  source 1..17: mol_type = other DNA
ctctctacggctaacct

SEQ ID NO: 27991 - DNA, 17 bp, synthetic construct
  source 1..17: mol_type = other DNA
ggggcccctataactct

SEQ ID NO: 27992 - DNA, 12 bp, synthetic construct
  source 1..12: mol_type = other DNA
gggcccctataa

SEQ ID NO: 27993 - DNA, 13 bp, synthetic construct
  source 1..13: mol_type = other DNA
ggggcccctataa

SEQ ID NO: 27994 - DNA, 44 bp, synthetic construct
  source 1..44: mol_type = other DNA
ggggcccctataactctctacggctaacctgaatggactacgac

SEQ ID NO: 27995 - DNA, 62 bp, synthetic construct
  source 1..62: mol_type = other DNA
ggggcccctataactctctacggctaacctgaatggactacgacatagtctagtccgccaag

SEQ ID NO: 27996 - protein, 189 aa, synthetic construct [sequence omitted]
